United States Patent Application Publication US 2015/0141320 A1 - sequence listing, part 2

SEQ ID NO: 36 - DNA, 33776 bp, Mus musculus
ggctgtacacattctgctcctctaaagcgccacccttggcatagagggagggttgcatcctcgttgcaattctttcttcccttgcctaataaaaacagaatgtgattcttgtcctggcccctgctgtgagcatgctgtgtttttaggtctgggttcctgtgagatcctgaagaaatagtcctctataggaagcatgtgtcaggaaaccaggaaccaggtatagagtatatgaaagcaggggtgtgtgtgtgtgtgtggggggttcatttacgtccctccgctctatatattaagttttggaagtgaaggtcttggggtacatgagattgtggcatagcatcctcttggtaacgtctgacctgcccattctatctcaaggctgactgagtccatatacctccatccacagcatcttggaacagagacacccacctgcttccagcacaggctgagccaactcatgctaaaaaccacatctgtggctgtgatgatttgtatacactcggtccagagagtggcactattagaaggtgtggccctgttggagtaggtatggccttattggagtaggtgtgtcactgtgggtgtgggctttaagactcttatcctagctgcctggaggtcaatcttcctttagcagccttcagatgaagatgtagaattctcagctcctcctgcaccatgcctgcctggacactgccatgctcctgccttgatgataatggcaagatcctctgaacctataagccagccccaattaaatgctgtccttataagagttgccttgggcatggtgtctgttcacagcagttaaaccccaactaagacagaagttatctgcattacagccttctgtgtagactcgggtgaaaaatcaattaggccgtaacatctaccttaatggaattttagctccctggtgtgcccctcactagacctgttggtctgttgtgtgcagatgtcaggctctggggaatgcttcatagtcataatcagcagctttactggggcaggtcctgagggcatccacataaagatctcattctataagggaagtcattaaaccctggacatggtgacagacatctgttatcccagtacttgggaggccgaggcaggggttcacatctggagtgggctatacagtaagttctagaccagccttgaacagagagtgagactccatctcaaaaaagcaataaataaagaggtaaaagaaattcagctctatcctgtaaaggaaaactggtctgacagtaatctaaaattaatttaaaaatctattaccatggtaaaaaatagctcagtgagtctccctgtagaatcggttaagtgcatcacttgtctaaaactgggcaatctagaacactcctcactgatgtttgtggtgacaagtggcctgagaccatttgacccgagcagagtgaagaatctacctctgtactgtcacctgcctcgtggtgccctttaacagctctggcccacagagcgccagctttcacatggcaccccatcgagcagctagaggacagcacgggaggctcagtgtgttggagaactacaaacgactcaagttgcctggcaggcacgtcagtgtcttccctcttccctactctatgatccgaaggcccaccaagcagagggacttacagagctcacagtttttgccttcaaatccctccgagcaggtgcacgtgtaacccccgatgccatctcgacacgctccttggttctggcaagggctgctttcacactggtcgccgtctgcaatgggaggatttggaaactaaggttgagacctcatcacggacacccctgcacccactttgcagagagcctgagcacacttctccttgagaggaattcgtcatatcttgattttgtttatttcccacttgggtggctgtggctgtgtgatacccctgtccttgcatcactggctaggtccctgatttctgctggaatgcattatggtgtgtttgtggctagggtgagatgctttgccttctctggaaaggagaaagacaagaggccagtgtgacacttgtttccagtgcctgctgatcagagaacacggaaaaccttcttaagccctctgggtatggaatgaaaatccaaagatgatccagccctggcacaggctctgcctctcctggtagtcacttacccgggggcaagtctgattgccattttggaataacttccaggtggtcatgatcagtagtaccatctctgatgctatgagcagtcatcagggtgaccactgtttagagaggccagtattccgatctccaccgtttgctctaacttgctgtacttactgaaaatatcatggaagttgatatcctcagatgaggaagaactgacataaatctttatctgtgccaggcatggtagaaaaaaaaatctgcagccccagttactccaggggctgtgctatgagggtgacttgaacctggggttttgcagcaacaggacaagatcccatttaaaaagatgtgtattttagtaaataataaaactggactcaatataaaagcactataaattacttatttatagtactatagaaacccataagggaaaagtgtagataaacaagatttgaacagaaatgtaattcaaactgatttcaaaagccaatcattattcctgatttaaatgttaaggagtctctctcacttaagattgaaatagaagatgtctcacctttatatttggtccagtattctttctaaaagaaaaaaagaatattttacaatacattagagaaaacagacatttcacattaagggtaaccattgccagtaacctgccctgaggagtgttccagaacacctccatctacaatctgcttcaacacatggctcttgctgaatattgaaacaacatttcaaggtaaccagcaagaagtcaaaatggatccattaattatataccactggagtattgtgttcagttaaaggattcctcatgcccaaaattaagaacaagaccactggctaccaggtatctgcgggaaaagtgtggattgctaattaggtttaacaggtcacagtacacactgttggttcacaaccccaccagcccccattcagatctagatgggacctcagatatgatcttaactagaaatggaacttaatggatgcaaattagggtgaagacccaggtaaggtcatccaggattatatgttcttaaccaatgagagtgtccatttcaaagtaaggaaaagacaccggagctaacagtggaggaagggtcacgggagccagccaaggtctgggtaatgttgggcaccacagcttggcttcttctggtacttcaaaagatcccagcctggcccagtcctgactttgtactcactgcctccgaaaggccaagtgaacaaatccttgttactttgttactttaagccaccttgtttatagaaccctgttatgctagtcatggcagtgagtgtgctgttattaaaatgtttcacccggtggtggtggcccacgcctttaatcccagcacttgggaggcagaggcaggtggatttccgagttcgaggctagcctggtgtacaaagtgagttccaggacagccagggctacacagagaaaccctgtctcaaaaaaccaaaaaaaaaaaaaaaaaaaagtttcagtctagactgggcgatacagcctggagtagagcccttgcctagttcatgggaggtccttgattcagtctcaggggtgaaaggaaaagacagagatctatagagatctgcttggtgcagactacatttccaaaaattaaacaaactttgacatgaaagcacatgcctgtgatcctagcacttcagagttgaggcaggaggactgaagttcaaggttattcctcagcttcatagtgagttcaaagccagcctgggctacattagtacctatctcaaaaaaaaaaaaagtcaaatattttctcctaatttaaatgtcacacggtcaaacccatttctggtgtgcagttctctgaactttagcacatgtacagacttgtgtgaccacccatacaatggaaacccacagccccatcttcacccaacctttcaatcagagctctccgcttacccctgaacctactaagtgctggtacccaccacaaactgactgatcttcaataaagcaatagcttttaaagaatgtctgataaataaaatcatacgtgaagcaagcttgtgaaactctcttccttcagcgtcatgcttccagagcacgtccaggcaactgtagaccccattttgatcttcctgttgctggcttgtactgtgcttaccttcacccaacagtgggcgaccttcatgctgtttccagcttgggataactacaattggagctgctataaacatttatatcttatgcaagacataaggtatttcatttgacaataagttttttctttctcagttaagtactcagggctggtttcctgcagcagtgagccactttatatggctttctgagaaattcacactatttcaaagtacatgaatttggaccctctggtggttccaaagcctccagccctgccttctatcagtacatccagccacaggtatactgatacccactatcagtgagcgctgtggctttatcttgaattcctgagatagctagtggtgtggaatatcttcttgggggcttgccaccgtatttcatctctggtgatgtggctgtttgagtcttttgttcattgaatttcttaggagttcacttctcttgggttgtgagttctctatagattctggaccccttattgggcatgtgaatttcaaacactttcttggtgagtagcttgcatattcacatcttaactgttttttttttctttcccagagaaatttgacaaagtccagttgattaatttttctcttttgagttatcttccatgatctatgtttctactaattgcctttgtttttcttgttttgccctcagatctctgattcagtttgtgtcagggtctgtttggtgtgaggtttgcctttttaggatataaatgcacaagtgttggagtaccgcctccgtgtactgccctccatacacaggctgaaactcagtggtagtatttataaagagtggaatctatgctggggacatactcttgtctcttttcttaacacggaatccgacgtggtaggtcaggaacctggcttaggaaccacacctaggaagatgagtttacctgaatacaacatgtattcctccccataattcttgcccccttgcacactctctaggagctaccatgagggtcagctgtatctgcccaactttctaagtcttgacataatgaaggcataactatctttttcttctctttttcttctctttttcttcttttcacataagggttaaggcttttatgtggtgattgggtccatggagctctgcaccatggtgactgaagccttgtgaagctttcagcattcctccttgtgcctttcctctgtcttccaaatgaggagttagcaacacagatccccctggaagcagacacccaaactgcaggcatcttatcctcggacttcccactctccataactatgagtaaaaccttcatgatgtttgtaaattacctagcttaaggtattttgttatagcaagacaaagggattgagatgaattccacttattgaaaaaggcaattccttatctactgaacagttttatatttatgtatatatgaatatatatacatactttaaacagatgcttaaaataaaaatcctgcaattatggattctctcattagatataaaccattggtttggtagcaaagaattaaaggaatccttccttccttcctgccttccttccttccttccttccttccttccttccttccttccttccttccttctttctttcctgagaaaggcccgtactatgtatccttggctggcttggaccaggccctcaagttcacactgatccacctgcctccacctcctgagtgctgggatgaaaggcatgtgccaccacaatgaagaataaaaagaaatcttgattccctttctgttttctggtggctgaaatggactgtggtggacagcaacataagaattctcttgaataccatgatctgctgaagtgaggtggtatctggtcacatgaccggattgtggctttctctctagaccgacttgcagaggtgtggtttccaggacactcatcggtacatttccctccttctcttgtcttgtgtggcatggcctcaccacagtgaatggccttggcttgagtctcaaaaggctgtgactgctcagtttaagtgctgcatgcttctttctcgaccagtaaatccaactaccccattagagccaccttagagtggtctgcgactagaagactccgtgtctgtgggtgacatcagaatggggctgggaaatcatccccagccctacttctctgacaagcttgctgaggggcctggatgtggttagaggcggagggctataaaagattgcaccacatagatggcagaaagaattgtaccggtttctccagtccctaacaggttggtttctgtcagcttcatttccaagacttcttcaaatcttctctactaagccagttctccctgaatatgggataaatggatgaatcctcgaagcggtgttcatattcttaagcgtagtcaacatcgttagctacagcaaggttccagaacaatcctcacatttgttgtgtcctgtgatgcaaggcaggggggtgggtgtctcggacgagccaggggatgattttacggagcatgggggactctttcctgaggaaattgtttgtgattaagtccaaatggcttggacttgaacatctttgaaggtaaagcgaggatggagagcttcgggagtccgaggtgcctgtgcagaggacggcgttggtccttcccacgtttccagggtcctgaactcagtaagtctcctaaggctgttggttgtttgacgagcataaattaatccttttttctactcctagagccagctttgcctcataacttggcctctcttatggtttgaatatgaactgtccttctgagggtcataactgaacacttggtccccaggtggtggcgttttgggagcttctgcaaacttcagttggggcacacccaggggtctagctgacctggtggggactgtccttaggatcttggattcagtgctttcctgttttcaccttttgcttcctgtctgccctgaggagagcatgctccctctggctgctgctatagtgtcctgcttaagctcatgaaatgaagagatcacagaccgagagaaccctttgatagtgaaagctaaaacacttaatgcctttagtcacagctatctgaaagcaactgctctgattgcacccctcaggggtcacactagcctaaactcccctggtggtcttggtcactcgatcctggctacaggtgactgagttcctaagtggagccagtggtgtggccatgaagtggtgcaggcctgactcagtgaccttcgatggtgccagtgggccttgcagcttccacttgggtccaacaactgcctgttccttcctaagctctcccttggcccccttttgttttgggggggaaggggaccctgttctctttagcacattcttgtttatttaggctcagatttctcctgggcacctgaaggtcctctcctagggaaaaggagcaggctcacccctgctgctcatgggtggtgattggtggtgccgtgggcctcctgtcatgtgtctgcgtggctggcatgctcttcctagtcacagagctctttacccacaggagtgggagggtgaaggcaatggtgtgcattcatctcccacaggttaacttggccacactcgcgagttctcattacccttctatgatgtgccatgtctcttcccctcagttttcctactcaggaggagagctgaagagatgaaaatgaatgccccacaggcaaaagccaggatgctatgcctggtcatctcacctctaggttgctttccctgactatccttcccagccttgtgggtaaaggtccaactctgggccagcctggaaccctgtagcagcccagaagatgggatggtccagcctcagctaataagtaactgagaggacccagcctggacctggcccgactcaccgtcttctcgtcgtcctcgaagatttcacggacctcttcataagaacaaatttcttccatacactctctttccagatttcctttcttgaactcttcaaaaaatgagtttgccctccgagtcctcgccaggacattgttggcacgttcccggttaataaacactagaagacagggaaggtgaaaggccctctcacccagtcttcacacaggccttttcccctgcctggaatattcttccacagtgtgatgtttaatctccattgtcagcctgggagactgagacatgtccgcgtgtgttcatgagggcgtttcctgagagaactaactgaggggaaggctgcaccctgagtggtgtgggcagcattgccacacagcctggaagcttgaggagaaagagaagtcccccagatggcctccctttcctctgctgcctggtggccacagcaggagcggctccatcctgtcacaccctctctgccatgacagtctaaggcctctgaaatcataaacccttaagttgtccatgccaggggacgcaagagtggctggtgtgcctatccagttgcacgcatggataactctattgcatgacccttcaggagggccagcatcctcactagcttcacgccccctcccttccccctgtcttgacgctggtcacagtaccagccactctctgatgtcatttatctcctggtcatcttcttttgcctcagtgagaatgtgcttctacaaaggcatttggcctgtctgcccaaggctgttcctaggcctggaaagagcaggtgcttaaaggtccctacccagggaaagaaggtgaccggctgggcttccagctctcgctcttcggactaacctcagtctccatgaatggcttagctaggacactatgctcactccttagatggtcacacagacccaccatgccaccagcagccataggttctgatttgaataaaatcaagtttggcagcccagaactaaagtgttataacatggtgaacactgtccacggaacccagcaaggactccaactgtcctgactcgaggggtgggagggtcctgctgctcactgtcggctgtgtgctttgttactggaggcctttgtccagttcccacatgttgctgccctcaaacatgtggctgtctctgtggggctgaccttgccagtggcttactgacatcgacccatcgactgagtggtagcaggtttcccagagatgttttcctcattaaggccccagtacatgcgaggtgcccagtgttgctgaggcttctccttgtactggagcaaggccagctctgcacgagcagagcctgctctgggctagctaaaataagcctttttggggaggggggaacaggcctgggagctgctcactgcctgtacagctttgccttgtgcagtctctggtccagccgagctccccaagctcagggccttggctcctgtgtcttctatgtctggggtggctttgtcttggtgtcattttctctgccctcccctctctccttatcatggtttctctctcactttgtctccattcccttcctctcctttctccgtttcctttcattcaaatctccatgtgctctgcatgggtactcgcagctggctctatgtatacctttagaagccagcctgtcgctggtcagcgaaccaagcatttcaccctcccaccctcccacccactctcaccccctctccccgggccgctcttcaccgtgaaggactggagtacttaccacctttcccagggagcaggaggctggccaggacaacacagagcaggctgagttgcaccgggctccccatggtgtggtcaaggacggcagtggctgtgacaggcatggggcaaggttcactcaccctgggccccaggtggccatgggccttctgcttatctcagccttctgattggagccctgggccagcaatgaggtcaggggactggggactgtggtgaccagccccagcctttctaggggaggctacccttatccagaactgccaggcagggcctgcttcctgcagagagcaacaatagcatttgatggggggttgcctggttctccaatgctcaccccagccctgctggcacttacccagctggtagaggggtcagtcccccctccttgttttaaggaacagaagttgaaacaggcatgaggcaaagcatgggtgtcaggtcagatgtgggatttgaatccaagccctcaatcttctggctgggccctgctgactccgggcgggcagaggtgtaggtgtgaggtttatgtgtctcttggacaatggctatatattgtagtcacggaaacaggctgagctattggggaacaggaaccctgaactgttggtgtcttgacacaaggtcacttctctcatacgtgacatccagggaagtccacagggccatgtggcaatcatcagggttgggggtgtgttctgcccaccaggcctgccactcccagccttcccgcaggcctggagggtggagactgtgtgagtggagtcttggtgcttgatggccgatggcacttctgcagagcatgtggctcataccttgggtcggttctgcaggggagtagccatttcccttggtcctgaaagaggaggccagggaagggtaagccatctgagagctatagatgtggaaacagctcctctcacatgctgtggccatttgactcttctgagagtgtgtgtgtacatgtaattggggctacaggcccatgctccggtgtccctagagaactgcaggagcagtcccagcagcaacaacaacaaaactccctaactttggcctgtgaggaggcagtgctcaccctgactccaccttctacatgctgagcccttcctccttcaaagcttcatctggcagagctatttttgagtctgcggagcatgcgcaccatgcctgctaattagtgagcagcaataggcttctcatgctcactgtactggagtttggttaggcaatggctcatgactgtggctgcatgcacgtagccagagagtacggtgatgacacttggcttatcactgttaccagtgctgagagggccttggcgtgctgtgggtacctgacaaacacacacacccgtgacatcagatgttgaggctgatgctggcatctcaccaggagggaagtcactgtcatttcctaggctgtggcagacataacagaacttgggaaatgtgcgcggtgctctggtggctgttggcaggagtctggtgcctgatcgctgccctgcctgatgatgcccgtgtactgtgtcactgagcctacactgagtctgtgaggtactcacagcagacctgtggtctgggactagggacaaacactaaagctggcttgagggggtcctccctttgtcgcctcccctctctatggccccacccccagaaaggacatgctgactggagaataagcacaacccatactgagcacgtcagtcttcagggagctagattctcagtaaggcctcccaagggcccttggtggcaactcagattggctctgtgagatggatgcctgcctacctactagtgattggggaaactaaggccatgacgcacttgatcaagccctctcagcttactctttgactctagtccaccttccccttccttttcccaggaagagcagccccgccgatgtgtatgtgacttgacatcagaggctccactcagggacttaaggacaacccagggtaacagcaggtatccccaaggtgtgctgaaatcagccggtccctgccagggggaaacagtccatggcaggggtgcacactgtacttcagaaacactcccttaggcaacccggaagcatgaccctacacgtggagaccatgtttctcatttaattgaaaccaagacagggtgctcacaggaagcacaagtgagcaacagtgccaatgatggacacacaggcacgcacatgcatgcggcacattcacgtgtcctacgtgctcatgtgcatacctactgtgtagtactgcagaccgaatgcatgcagacaggaggcagctacggggagacgggagcaaggcctgagcctcgcctccctcagggacaccctgcccctcagctgcctgactgtgactgcactgcccagcccctcttgagtttctttgtgagtctctaacttagactcttcccccggccctgctttctgtttcccctttcccagcctctctcatttacctccccctctgctttcttcactctctctttatctcattctcttcccttacacaagaatagcaggaaagtccatagaacagcttcacaggccgtagcttccttcttgggacgggttgggctatccaaggagctacagtagtgggagtcggaaaaccccaacctggagcttggagtccatgtgtctgaccagccagtctatgtactgggagaccctggtgtacaccccaatgtgaccaatagctgcacagccctccccccagctgaccacacctgtcagataccatgtgccatggtagtgcgtggcatgtgggccaccgctgtcacccttgcaggcgtccttggtaccatccatgtagccagcgcagaacatgttctctgtgattttgggggtgttagagctgtgcttggcgtgctccagacagtcctgggtcatcagccggggcacctcgatggacatgagttccagggctgtggcaccacggtccagtagctggccccagccactgacccttgagaagcggattctggctagggtgttctcggagaaggacttttcaggcagacacaggggcaccacgtagtcagtgaaggtcacaggccggtgaaggcggagcagggcaatgtcgtggttgatcttgccgcggatgtacttgtcgggcatgatgacctgtgtcacccgtcgtacttgctcatccccatccttctcactgaagtcatgttcacctgggaggacaccacgccactcatggcacatatcctaccacgccactcatggcacatatcctaccatgcctcatggcacgtatcctaccatgcctcatggcacatatcctaccatgcctcatggcacatatcctaccatgcctcatggcacatatcctaccatgcctcatggcacatatcctaccatgcctcatggcacatatcctaccatgtctcatggcacgtatcctaccatgtgtggccatgtccccacacagagctcttgtttgtcttgcttctctaacctagagtatgtggatagggctgtggtcagttcagcctctggtgtctgaggatttgactccttgccagggtctcaggagaagcctggcccagggtccactgcagttctggagggaaggttgtgaatgggcagagcctgcaggagtgaatggggtccttgacacccaatctgagtagggcaaggtggacagagtagccccccagtttcctattctctgacaggaggggggcccagaggacaagtgggtcatctccagtgccactcttgaagatatcacctggttagagacattgtcaggccattggctctcagcctctgagccaatcttaatctgaaaatgccctcaggccagaggccagggatgggccatacctacccatcaccactgtgatgtttccccagtagcggatattatcgaagcagtgggctgcggtcactatccatctggcgtccagcaggacggccccacacagcaataacccattgattttcagcacagcctgggcgggggcacacagacaaagagagccatgctacttttatggtctccttgcccccaaggaagcagctgacttgacacaattcctgcccaccatccctttggggattcccccagcagggtagagcagccctagatctgctggctctggtagacaacaggggtgcagaagggtggggtgcatggatgatgaggtgcaactacagctcttcaagtgacttgtgcaaggcaactgtgggcctggcatgggttttcatgggatgggccccaatacctgctttctttccctttctctggacaagagtgtgggggaggggatagggggatggaggctggcccatgtctcttctgtataaatgtaacccaactcaaaacttccataccccagagtagaaaccctaatgtcaggggagccggagctggagagagaggttttccctggacggagagcattacctgccatggacactcccctttggggcacacgttgcctcccacaatgcggccttggcggctgctggagtttcttttttctacaacaggtattctcccacacgggtactcaactgtatgaaacagaagtcagagagagcagggtgcagaggcgaaggtgactgtgggatgagaagcagttggctgctgccatggctcctgctgggggcagtgagaggcctcaggacagaggaacttggggcttacttctagagtgggcagggagggccttgtgcagcggctaggagaggaggcagacaacggtgtggggacagctgaggacctgctttctagagctggggtctgccagagcctcacagggagaacgtgtcgttctggttcgctatgaagaaagtgacgatctgtgtaagcatgggccaccagcacaggaagacagggtccttaaggcagactcgggcgccacccactgcgaaggcttcgggtaagaaagaacactgagctgtgggcttccaactttccagcttcatgagacagactgagccccatcctcttccggggaagcctccgccttcggaagcagagctcgaatagtcttcttgtggagatatgttttcagagcagggggcaagagtggatcccagcacccacaacaagcagctcacaactgcctgtaacgtcagtgcccaggggagctgacattctctgatcccttcaggactgtcatcatctgtaatactgcccacatgcatataataataataataataataataataataataataggtcatcttatgttgttaactgcagcagtggatacagatgccaggtgtgcctatgtgactcccgattatgtctcagagactctaagtgggacataagagttggtgtaggacctcctcatccactcctggccggcttcaatggtcaggatacttgaggcagtgcaggatgctggcccagggttccagactaacagctctcaggtcaggtgtccttcaagtctctaccctttcacctcaagtcagtcagcatctaccaggtacttgataagcagaggtctgaccttgttacacatcatggagctgataacttgccacaggcccacacaggtgactgcctcttcagagcctaagacagctccagtccccacagtctattaccttttggtttgcaggacacctcatctggctgtagcgtgtagtcctcatgacagctacaggtacgcttggtccctacatggtccctgcagtactggtcacagtcaccattttcatttgcacagatcagctgctcattcttgcctgagaaaaggagaagacaacctgagaggtctctgcaaggtcggcagacgggccatggtggtggttgctcttgtccccttggaatatggcatgtagctgtgggctattaaggctgagcttgcgtcacctgccctatggactgatctggcgggatggagagctggatttgggagtcacaagtctgagaaatcttggagggtgctaggctggtgtgtgatgacatcttccttccaaggctctaatgagaagatgtgaagggttctggaggtggtaagcaaacatttccaaggaaaggaaatgttctcaatagaatggggaactggcccacggacatgtcaaagggagaagttactcttggggcaaccctcatgaccatgtgagccatctaggcccttggctccagcactggccatttgcaggcgagggtggtcagttcattttagtatagaggactgtcctgtcattcacagtcactgatcaccaaaccttacaggcctccatggatcagtgactgttagtgagcccttctccccttccccctttactctctctggcctctttctgatgagaaccggaggcagctgataccaggaagaacccacttgggcaataaggagtccttggtctgcagaaaggacacttttgtcctgtctgaagaggtgacctcgtgggcatcccccaactggaatactgccacttgtctggggccttgggccataccagatggctaaccaaaggtttgattgatggtgggatttgggaccggaggggctggagacaggtctctcacacctaggcccggggttaagtgactttctattggtgatactgcacagcactttacatgcattctagaagaactgagctgtctatgtgagctcacagaagagaacaacagaaagcctgcttctggccatggcaaacgttggtgtaataaaatactcatgtgtatctctgctgtcagtgaactctatggagtccagtagtgaaccgttgagcccagagcagtttggtggtctccaagcataacaataattgatatttcaaagatgaataaatactttatacctttaaaccagcagaggagaagaagtttacctagctgacttacctggtggggacagagatggaccctccctcccctaaatctctccagttcagcagaattctcagggcaaggagtcaaaagggacagacagcgagtctgagacccagaatcttagactcataaatcaaaggccatgggtttaaaagaaatacttaatgtctcccagatcaatttccttcaggggccgaggctggcctggacaccctctccttactcgatgaggctgttattctctggaaccagtcacccaggcccttccctcccgactccatccattgcaaacggaggcaagaagttggtctcacttttctcacagttccgaccctcaaagtctaggaggcagaagcagacgtaagacttgagatgatcctggcaggtacctccgttctgacatggattcgaggcacactggtccccatctgtgggtgagctgacattagtgtgctgcaaagaaggggtgtgggggaggggcacagatggctttcacctactcaccactgtaaacaatccagaactgcttctgagagggaagaagaagccatgtgaggcacggtcatgagaagtagcacttagtgtccacggagggagctcaggagctatggctggggctcctgacctgggcatctgtgtggggcttgggaagatagcgttcctctggagacgaggagggattatctgaggttgatgtttctctacgccctttctagagatatttaagtcgccacacaattgcctttcccaagtgagcgcaccagagttctgaccctgatcctgctttctccagttctgggctggacctctaaatgtgggaggtgtcatcccatgggagttctggtctgaataaagaggagatagtgagctcaacaccagcatcccttactctctacctcctgactggatgcgctgtgactgtcacgccttccctgactcctgaacgaccaaccagaataaacctgtctttcctccagttatttctgtcaggtggttgctccagtcagtgaggaaagcagcttctccaggctccctgtgtgagttgctctgagtgagtgtgagggcacttgtgagagaagtgtgcggtgtaatttcctgtgtggaacattctttgggtttgtgagctatcctgtgggaatgagggttcctctgtgaggtgttctgtgggtgtaaattctccagtacatgtgaaattcctgtgtgaggacttctgcgaatgtgaggtctcttttgagagagagagaggtgttctgcgagtgtgaggtgagcttcctgtgagtgtgaggtgagcttcctgtgagtgcaaggtgatcctcctatgagtgtgaggtgagcttcctgtaagtgtgaggtgatcctcctgtgagtgtgaggggagcctcctatgagtgtgaggggagcctcctgtgagtgtgaggtgtgatatgagccaaggctggtgagaagaaaagcccttggagaacgaacaaccagcccctcacaaccgcccctgaagctgtgactgactattttttccagagatgatgacaaaatgaaacacagtggaccccgtcttaaagccttgtcttatcctgacacacccttgctgggaaaaccctccagagtgagatgtctaaccagacaggaacatgctcagtgatgtataaatatgtatcttttacaaaatgaaaccacagggccaggcggggtagcacatacttataattccaataattgggaggcaatgaagatgaagaattggaggtcagcctgggctacatagcaaaaccctgtctcaaaaaaaaaaaaaaacaacaaaccacaaacaaacaaacaaacataaaaaagagtaactcaggagtggaggcaaatctgtgcacatggccaagtgtggcagaggaagccttggtgttcctcacacgtttccagtgaggcctgcgtgtgtgtgtgtgtgtgtgtgtgtgtgtgtgtgtgtgtgtgtcctgccttcttgaggtgaattttccctctcaggtttacttcatgggcagcccgtaaggaataagggattcccctctgggaaaataggagacacagccagtgtagtttatgagttgtatttcttgtaaaactgcttgtggcatggttgagagagaaacctgtgtgtgtcagggttcctgtccatctatgagtactgagtggcagcctccgcagtgagggggagacagatccagagacataggtgtgaccctcacaatccccagctcacttccttccagtctcagtgtgttacacaagagcaggcacgagatggggcactcacggtcctctcagggctcttgaagatctcccgggcctcctcaaaggagcactgttcctcattgcactctctctccagagagccgggccaaagctcctccaggagtgagttggcacgcctttgcctgtgtaggacaccatgtgcttcctcctgggttatgaaaactgagaaacagaaggtctcatgtgctcctggcagcttccctcaagctgctcagaagccacccactcttggtcccatcaggaatggaaacagccacactggatcattccagtgagtgaaggaaaccacactgggtcagcccatgaaaaccacccacaccagatctctcagtggcagaaacacccatctcccgcagtgatgggaacaactgatccacattaatctttttccattccactctttggtggggaccaaagagttcctgttcacctcaaggaacggaaggtgcataggttgtttccgtcaatggcttaccatcttctgtgggctgaaggtcacagggaatgacacagaccaggcacagctgaatttaaaattggatgtgttgtgctggagagatggctcagcggttaagagcactgattgctcttccagaggtcctgagttcaattcccagcaaccacattgtggttcacaaccatctgtaatgggatctgatgccctcttcaggtgtgtctgaagacagctacggtgtactcatatacattaaataaatatatctttaagaaaaatgggtgtgtctttcattgatggtgacagagaacatggcacagtattatgtagaagtatatggtgacatatttattagatgagatgaaagtttaccatatccatgtgatttggcatttctcctatatctctcttaggaatttataatgagaagatgcttggagagcttacaaaaggtcacgaaatgacacatcggtagtaacgagattgccaaatggtgtggtctcctgtgaggccagtgaacacgaggtttacatgtgacaccaagccacaaagagacagttaatcacacattgtgcaacccctttcttgggtactcataaaatgtgtgcacaaacatatatttaaatctccctctcttctcccatctgtgtcctctatcctgtgtccagggagtcaatcgaagaatctcaagtcatagccctggggcttcagatcttaccataacatagcattagccctgggtaccatggccacagctgcctcacctggggttctgagtcctgtgattttctacattggaagtgtttcagatgcagcctctaccacacgaccttgaatgtcagtgacctcgacagaaactagaagacagtgttccacacttggctttggaaaagcaaagatttgggtctgaatcccaggagtgggtgtggagatggggtgcagatgtttaaatcacctaaaggtagtcaggggtggaaaccaaggatggtgttgaggccctcaaagtcctcatatgacaactgtgtcacataaactgtgtgcctgggatatctgtggacgggaagacgtgtaactgagatgggaagaagagccttgaaggaaggcagttatggaagacccaatagcatccaatgtattcaggaggagggctaacagagacaggctttccctatgcagaggaggctcagagggccttactgggaggagctgggtctaggtggggttgaaaggtggctctgcttaccaggaggacgttggtacaccccagaggagggtcccttggaaggacaagagtggaagtcagataaaccattttgggaagggacagagagagggaagaggaagggccgaggaacactctctggtgttcctagagaggatggagacactgtccaactggaccaatcaatgtccttcaccaggcagagaaggatccatatgccaccagccactgggacacatacacttctacagcaagtgattgtgtaaggggtgggcccttaggagaaggtaaatttacttcagccaatctcctggagatccaaagcaaacctgaccccaaggtcttccataccactgcagagaacttgggaaagccattgctcctgttgtcactcagttccacaggagaatccactgcaatccctatgtgccatgggcttccaagggggacagtactggctcgaccacccatgtcactatgcatgggaatgttcctggcagcatctctttctgtaagactgcaacttgtgattcataactacgagctttctcccccaaggccttagaggcacacatgtatgtatgtggtgggggacttggtgggaggggctgtggatgtggatgtagagccaaggcagtgagcgagccctctagtgcagttgccctgtggctgttctgacacatctgaccccttgccacagagctctgtactgagtgacccccaggctctaatttcacaggcaagtgtctgtgtccatagagggcaggaaagcaccctacttctaaaacgtctctggaggacgacagccaaagatcccacccctgtgaagagctgcctatttccgggtggcaagcatccagatgctatctgcttttgtcagggacacacatcaagtgtgctgctcatgagggggttcctgttgatgtcccagctgcctctgcaaagagcagcaactccatgcacagagaaaccctccccggacagacagacatatatacctgcagtccctagaggtccctggagctggagcagaaagcagagaagcagcagcccatgcgcctgtggaaccatgatgagactgtggcttctggctggtgactgtccagatgctgccgggagggcaaaggtcaggggggaggggagaggggtggagaaagctggagcattggctggaagcatggaggccggttggaggctgccacttatgtctctggcacttgtacatccagggaaagaggaaagctaaggcaggcaatgtgggctcagaccggaggtgtgaacagagctcacccaccgatggatgtccatattcacagtgatgacattgttaaagcacagggtatgggcttatgacctggaaaagacctgtagggcagacctgggctgtgcagccgtcaatggctctcaagggctgccctgcccctcctcttcccacactgtggaaacagctatcggcaggtggcccatgacttgtccctttgtgtcctctggcccaggctccaggtggagttgtggacactgggttgcctgagatcaacaaggtttctcagcacgtgaaactttctgtgtaaaaactggatctagcccaaggacactcggtttatggtcatgcagcctcctagactacactgtgggcttcagttggaccctctgaggaaaatgttcttttcagggagggggcagtacaaggctggaccactcttttgggagtcagacctcatttgtgggacactacagtacctctccctctctagtcagggactttaatctttgccagcatggtgtaccccaggggcacctttgactcctggggtcccttcacacttgggaccccagttgcttcttctgggatagaggtcaaatttcacccagtaaaatccaatgctctcgtgacagggtaactccagggacatgagaggagatggcagccattcatcccagctctcttatgtgaggctggacctggtctcaggattctcttccctattgagttccaggaactgtgtatttagctttctggagcagcagaacaattggagttgcttcagaggacagatgctgagcccgcctggtgcttgggctctggctaaagttcttcagcagatggcgacctccctgtggcacgtgccttggctggctcctgcgtctcaggcgtcaaggatcccatttggacctgcaggggccttgtttgcttggtcttcttttcacacctgtaccatgggtaccattagcactgtacatacatagtgcagacacatggagggatagcatggggtcactgtctgtccgtcttttggactcctccccacttaccttctcaggaaagataaacaggcttcttctgggatccgggagtccttcttatgtggatattccttgtatgtgctcagggaccatttgccccttctctgggataggaagcactaagcctcatccccagccagctccccaagggctcccccacagtctgcagaacaggactggaaccctcagcatgctgctacatgtcagcctcacccttgtacatgtgacacacatgagagacccgtaagtgacagtgggctcagaattacctggggacacacacatacattatgctcacacttccttatggacttgtacacatgcacactgtctttgcacagttgcataccattcttacacctatgcacacactccacacacagcctatgcacacccttgtatacatgcacgctacaccttcacactcacatcatccatgacacctacacagatgcaggctccctcactccatggggaagcagaatctttggagcagtcctaatcacagagtttgatgatgcctgtgggttctgacaccctgcaaggttggggaccagtggcaatgccaccagtaacttgaagtttaagaactagagagctgatctgaatcagaaaggtcagtatcacttttatttcctctggatctgtcttgctctggatctgtgtcttgctctggatttgtgtcttgctctggatctgtgtcttgctctggatctgtatcttgctctggatccctgtcttgctctgggtctgtgtcttctctgggtctgttttgctctgtgtattagcctcgaggactctactgttaacaatgtgtgaatgctcctgaatttcctggttaggagcaggtactttcaatccaccagattcatttcttgctcctttgtgctagtccctattctagtgagtgatctcaatagtgaggtgtcctcatgtttgtcctgtatgctaggaaggctcttgctcacctctctttgatttctgcttggatgaggatacttaaaatttttgctttgaagattgatacacatgctttatctggttgaaaactgtttttaaactcctggtgcaataaccatgataaattaatgatcaattaaaattttgtacatctatgagactgctgacttatctggttcagtttgacatggtaagttacagcagtacttttttgatattgcaccatacctgcattacatggacaaatttacttgtttagaatttgtggggtttttttcccaacataggtcattgttcttgcttgcccaccataaatatatgattgctgaagatacaccacactttatctgtagcatatagagaatcaaattggcactgaccttgaaacttcctcccttatgctttgttttcatagttctgaaagtatccattggaggaaagagtcatcagctgtcccattcaccagagaaccctgcatgctagaacagtgactacataggtagtaaccgaacctatgaatcaaacagtggtatgactgttacagggctaacaaactagggctgttagaggggtaaccaattacaattgttagaggggtaaccaactatgacggttacaggggaagccaattacaactgtcacaggggaaaccaactatgactgttagaggggtaaccaactatgactgttacactggtaaccaattacaactgttagaggggtaaccaactcttttctgatttggatatgaggctggctccataggagggaatcgcctggtgctgtaaacctggccaaaacccaaaagaaaccaaaccaaaccaaaccaaaccaaaccaaaccaaaccaaaccaaaccaaaccaaaccaaaaccaaaccaaaccaaaccaaaccaaacgccatggtctgggaggttactggccctatagggcgagtgtgtgtgttctaccactgttgtttgacatgttctaacactctttgctaaatagtttcttagggtttttttttttttgactttttaaatcagatttattcagtggtggctggatttgggggtgggttccaatccatcattgcctgatacatgtcaattactaataaaggtcaaatacaatgccagatctaaagccacagaaggagggtgtaaaatgttcactttcaaagagaatagtcaaagttccacaacgtggaactttacctagagcttagcatattaaattagtagtactgaaacaacaaattgggaatttaaagcaacgcctggtagttccttctaacatatacataaatagcatgaaagacgcttttgaatatcacctaactgcactatggctttataggtcagatgaaccaatgacaaaatgggtctccattctgcaccctgtcctaatctctacatcaaacctatgtccaatttcaagtgagagttttaagtgtccacatttcttaagccacattcaaggaaatcacatcaattctggatgccgtcttcatcttggaatgtaagattccagcaggttcaatattggcatctctcttctctcaacgcgtcctttaatctggtcagattttgaattctcagtgttttctgttgaggtatggtaacctgtttattcctggtcacattggacttgtggttgccatttggggtgagtctagaagatgggaagtagaaacatttcctggcctgagtctctaacagtagagatgtagaagagagagagagtgtgtgccaggagaccagctgtggactgcggggagctgccacccactctggtggtagcattacttggatttggggaagcagaaatattctggttactggaaactggtgcaacagatatttggttgcattgaatctgtgtgggtaggagcagtgccggaagcagcaaccccagccctagctctgcccatgtctgctccatcagcgcagtggtgcgactctctggatgttccgtgggtggagatctgcacggcttgtgcgggcgcaggcaaggttgtttcttgttttttctacaagttacagtcagtttttctggttttcaagaattaaggttttgatttgtttttattttaactctctcaatttcttctttatacttttaatttaactgattatacttgttatccacagtgttgtcagattagattaagtggataccacagaataatggctacggacttccaaacaccattcacaaagtatctatttcattgctttgtgtatgttctgtgtgtgctgaaaatggtaccatttcctgtttgatacacaggcatcagtgtctatggcagcagcattgaccaccaagccttgctgtctgcacttggaacattattactagcctaaaagtttggatgtccatctagctccttatagtctaactgccataaatttcatttttgttagtagcattactatgttagctttcttttccttttattcaggctactccttttgctttcctttattctcagtcatcgcccttttctcaggctcccctttagtggtaatttatctagcctgtttggtgctgtctgggcacatcaattaggacactagttgccctgtgaagtcagacatgtctgctcacatctctttattatatttttgtgtctctgctcactgttctttccccatttctccaccctacctttctcacagatcaacaaacctgcttcactctctaccttctcaacgaggagttgtcaaatgtgttattactattctgtaatgcctctactgcatgtctctagtcccctccacactcagcacacacccaagtatatgttgttactattttaacaccatcactgtcagataaaataaaacatatatcatattatgtgtggtacccgcacttcctccacaccctaccgttctgcctcagtcttacagtagccacacaaggcatttgtgacaaccattctgggagcccagggctcacaccaagaggggagatggcaggaattgctggcctttatccaaacttcattcacacaataaagacttctgagtttaacttcttacttatatcagagcagtaggaagtaagagcaatgctgaatgaggtgtgacatttgttgttggttggtttttagatgaggcctcactgtgtgtagctcttgctggcttggagctctctgcgtagaacaggctggcctcaaactcaagaagatctgcctgcctctgcttcctgagtgttgggattaaaagcatgagccaccatgcccggcaaaaacatgacattttaaagtgtccttatgaggacaagttcccaaaggaaggtggctttttcaaaacaggctgggcagttatgtcccacgattcttcccgcataacacataaccagaaatgctactgagtctttgcacgttttttattttattaccattctctgaaggtgtagccagtaatggctttgcaagccatagggcaggggaggagggtgtttttcctggacatacagtggtgaacgagcctcggtggcctcccatggcagcagggtgaggagacagggagggaccgtaaagtgacacatgttcagcagcgtgagaccataaatacatcctttacaccaagatcctatgtacacacgtgaacatatatacacacatataaaaatatctgccctactaggcacagagagtttccaaagaacagaatttgtttctgaaacacacaaaaaagcggaaaacaacagtttgtggcagttctgccgtgacttgaatggaggctgcagatccccgtcccccaccccaagctcagctgcagcccctcctgctgtagggcagagtggacggggctaggagaggggaagtggggcctgccctgacgtggagaggcagccagtgcctgagttgctgaggatgactgacagcatggagttatacattttctttaaaaataataaaaatatcctaatttaatgatgttcttttaaaaaacagagagtctcctttatattgtagaaaagaaggctaatattttaaattatactttacatttcttgtgaaaacgaaacctatgcagatgcaagactctcaatgatttccaactgcttttggtggaggacacgccccctggctgcccaggaggacacaccccctggctgaccaggccttcctgcacctgtattccagggagtgccaggtctcagcgagagtgccccagaaatcagttagttgtataaacaacgtgctttgatgtaaaccccagtaacaaaaaatagttttatatcaaatacagtatcaaattgtcatttcatgtaaacacagtgattcttggttaaagttttgaggccagagtaccacaaaaaatggccatggggttaatccctgtttaaaaaaaatcaaaaacttataaaagacgagagtcccttgacccccccttaggctgttggtagcaaactgttcactcctgttagaagtggcttcctcagggtcgtgttgccgtagaaagcaccagagaggccaggacaccttagagaggctgcacagcaggggctgttggctgcctcccagcttcctgcacaggggtctcctgacccacagccccgcctctgtccactctggagtctctgaagaagctttggtggtgaactgttgtctcctggcatctgcatatgcagtggggtcctggttccaaggccccaatgtcctctgaagcccatggctgacaggggcctcctgtttccagagatctcggagcaccatcccctcccaaactaagcaagcccaagcaaaaataaaaattaaaaataaaaaaaaaccaaaaaacttagagatttgcatgctggtctactgcacggtgacctcgagtgcctgccacaggggcctggccactatccctggagctcggagaagggagcagggtagccctcgctgaagctggatgagctgctcagcacggctgaccctgggctggagtctgcgggaaaccagtggagacaggcttcggctctggccctttgctctgcacacctagaaacccctctgcttttaaacgggctctgggctgaggatctcggcaggctcagggcacagctggcgcgcacagtggatcttacctgagctgctcagacactgggctgaactggatttgcccaggagggtggataggctgctggctggcacccatccctccttgctgctggtcaggtcccgaacatacctgaaagaggaagtcactggctgtaatgttccacatgcccccaatctgtcgctgggtgcctctgaggtgggcaaatggatgcatctgaggtgggaacatacagaggcatgtctgaggtcagactacacaggtcacctctgaggtgggaacgcacagatcatgtctgaggtgggaccacacagggacatgtgtgaggtaggaacaagtaggtcatgtctgaggtgggaatcacacaagaacatgtctgaggtaggaacacacagggacatatctgaggtaggaacacacatggtcatgtctgaggtaggaacacacaggtcattcgtgtgtgatggacatgtctgaggtaggaacacataggtcatgtctgaggtaggaatcacacagggacatgtctgaggtgggaatcacacagggacatatctgaggtaggaacacacatggtcatgtctgggtaggaacacacaggtcatttgtgtgtgagggacatgtctgaggcaggagagtttaccgccatcttaccagaggccctcagcgccttcttccaccacctccaccatatctccactcctcatggcaagggtgtcagggccccctttctcatcatccatcaccactgtgtatttacccggcacctgagagtgacaagggatagggctgaggtttcatcctgttggcactccctcttcccagcgccagcagcccccacaacacacctatcctctatctctgtctgttctctacctctatcaccagctatacactagcagcagtgcccacattagaactagcaaggggaagaccagtgtagtgttggggttctgccacttgtaaaggttttggtgagatttctggcttaaactgaaagactcctagtgttagggagatggtacaattcatattgtggccatgttaaaaaataaaaacgagtgtatcaatgtgtccacattactacctgtctttacgggtttggctagaacattctaccaatgttaactatgtgtaagtatgggctgtccccttaagaaggggtaaaccatgcctgtgctctagcagaggcagggggcacacggtgccatggggctgtgggtagtggatagtgatctaagtgagcactgggtatctctagatgatgaacagtggctgcaacagagggcccaggccaggatgtatcctcactagacacagggacccacttagggacacccgtagggaggtcatggttaccagcttcttagggcccactccaccgtcttcctcagcatcagatgagttgatgagttcctcagcactggaccagcctccgtcctcctcaggggcctccagggagtgggatgttttgctccagcctaggagaaacagtgccgtgtgaggtatgtgcatacacacacacacacacacacacacacacacacacacacacacacacacactacagtcaccattacccaagtgtattcgatctgaggtccacagaccccttggaacgtgtatctgtgggactctgaacttaagtctaccatcttcctaggttcattgaactgtgtggcatgtgacagttttctgtcactggaatcatctgcttagactccccactggttcctacactgttataaaatgctggctccattctgctatgactgcatagcacagggagacgcagtatgagagtgcccatgtctattttgctatttgccgggccactctaagggttaagatgaggcccagaactcccctggacatttctaccttcttcaggcccctggacctactaagctcacctacttaaaccctatagcaaaccccacgaagggatgctgtcttcagataaaaattccgatgggcaatacctacttggccgccaggaaaaacaattcccggcaagaatgaccaagtaaatccctgacctgtgagatacacaagttaatgaccaggactaggttaagccatgtatgggcagtctagcaatgatagagccccagtcctgcctcctggcaaatccactgggttggccagtgggtccccgaatttcctactgcgtcattcttgtttatcttgatgtatgcgccaaaggatattacagtatttcccatactgcagacatggagatcataaactcctattgagtaaattcttcagacagtaataggttggagcaactaccctgtcctactgggtactgaatagtcactggacgacactggaggacacatcatcacacaaaaagcacagcaaggaaggccagcttgcttgttggatccaaggctaggcatacctgacatcatatagtactaggtgctggtgcagcgtggttcttccttgtaagaggatgcaggggtgtgatggaattacagaacagcccccatgaaatcagggcaacaaagaagctgttagctctgcaaccactccatagctgagcattcccagggacactggtaaacctctctgtcttcctagaaaacagctgggcctagacatttcccagctaccagctagctatgcaggctcagagcccaccccaccatggcaggaacaagtggagcccctctgtctacctccctgaggcctggggacagctgtgtacttggtcctgggaagtgtcatgtcaggcttgcatgtaagttaagaactgatttctagaggttcccagctatagtcatctcccttcttgctccaagacacgtgcaagaagcctgactcagttgtctttcccctccaaccacctctacagtgcttacacaggggcctctacctgagcagaaggactgttggagcagatgaacacttctaagtacacaactttccatcatcagagcccacccagcgggtcacaaactataaagaaaccgttgccttccttagcgtgtctgagacgcttcaatcagctcaagctttggcagctgccataactgaagtgcctgtgaccagatcagcaccaggccacaatgctgtcagagtattggatactctgttaacagggggcctggcatgctgctctggcagtttccagggagcagaagcgagacacatacatgaaaggatttacaagtattgatgaccgcagattagggggggatcactctctttggaggatgctgggacactgcatgagaatgtcaggctctgtacaacgccccccctcaggcgtggcctgcatctgcacccacttctgtagaaggcagtgcatgatggaaggtaggaaggatgggaacactaagccggaacgaggagggaacagcatttggcacaccggttggggaattgggccttggagcatcgtttgggggtagggtaagtctggtatcatgctgagggtgctcctgggaaccctctcctggaatctgagatccttgagggacaatggaggatttgggagaaggacacagagactcaaggccctgagtgtagctgactccagtggcccatgtgagtgactgtccgcctggagcaaagacttgatcttgcagcttctttctacccagaagaactgggctggctggtgactcgggggagggtgttggtactgtgacccttgaacagggcacctgtagcctgcaccagcactgagtgataaatctcagtgaaaagctggtcagccaagctgtgcctgtgcctgtgcttgccaaccatgggctaaggagccagcaggaatgtagcatctgtcagcatctgttactaggcttcaagctgtgacccatcagttactactgctcctggctcgtctgatctacttgctttcatcctaggtgccctgcacagccagacagcatgctgggctggggttcaggggctgcagcgctacctcgcaaaccaaagggagtcgggtcgctctttacttcgtgccgcttagcttttttgtcaggactggtcggagaggctgcaggaagaggaagaggcaaaaatacaacagtagagagaaagctgaagaactgctgagtgagtggaggaggcaggtgaaaggttggcgagatgaaatgactgagggttctcacagggaaggggagaggcccagacagcagaggtggtagatggtggccttagccgtcagtcatcctcttaggggctgccctcagctctgctttagaaagaacgtcgctatagaacaagcttcttttgctcaagtttgaagccaggtaagaattataagttggggagcacattagttctttgaacccatgcctgtcacctggggagagctggactgttgggagggatccctgtgcagagctgaaacacatcagggctttggtcactgaagagcatccccaggtgaccagactatttcagctctcagttaaaaggcttctttgccactgttcactggcaaaaacaccccagaagacgcctgaccatggtaatcagcacttgagggtcacgacagcaagaaaggcagaggcctgcagagctgacaggaaaatgtgaagtgaggcagagggagaaggggcagaagacgtcaggctggaaaagtggttaacagccccagttcttaggaggctgcactcgtaaagttggctctctctgtatccaaaaggcacccctaaaagataacgtcaggcatttgtatctacacagcattggtgggcacgaatgacagggtgagagatgggctcgtgcggctgcatgtggcgccagaggtcaccacaggaagatggtgtggaaggc

SEQ ID NO: 37 - DNA, 84819 bp, Homo sapiens
attccagcactttgggaggcggaggcgggtggatcacgaagtaaggagttcgagaccagcctggccaatatggtgaaaccctgtctctgctaaaaatacaaaaactagctgggcgtggtggcgcatgtctgtagtcccaggtgcttgggaggctgaggcaggagaatcgcttgaacctgggaggcggaggttgcagtgagccgagatacaccactgcactccagccttggcaacagagcaagactccatctcaaaaaaaaaaaaaaaaaaaaaaaaaaaagctgagacaataaaaaaaaatgaaaatgaggatttcattgtaaatgccttcttccatgattttcaagaaacagggccactaatcaggatttgatgagatcaacagggttttgcgtgccccagcttttcagtgggaaaattacatagtgggaactcaattttaatttaaaatggacacatgcagacctaaatggtgggtggatcacagactagagaaaaaggtttcagagcatctccaatgggacacaggaactaggaagtctacataacagcaaaatggagcctgttctctgtgccctcagatgtgaattttcacagcttccagttacacccctctctaataatacttctcaaatttccacatgggatgtcaatgacatgttatagaaacacaaactattggaaattttaaaattggatttcattcttactgatttctcaattacacatcttccaacaggctttggcatctagaatgaatgacaaataacaagtgtcattcaccaagcacctagaatatgttgggcacagtgctaagccattatatgtgttatttctttcaacttcaacaaaattcaagtatatttatatacagaaaagtgcccacaacataaatgtaaatctcagcgaactatcacaaagtgaagccccgtatccctttcttccaagtccctgcccatacctcagaagttcacaaggtgcctctcccaagcaagaccctcccctcccctcaaagataggtactatcctaacttgcaatatcacagactgatttccctgtttttgactatttatttatttatttttaaattttttatagagatggggtctcactatattgcccaggctggtcttgaacttctggactcaagcaatcctcttgccttggcttcccaaagtgtctgtgaaatttatataaatggaatcatgtaatatacattgtatttttagaaatcactttaacaactttgcaaggatggtattattgtattattagtcccatttttctttttctttttcaaggtggagtctcactctgtcactcggactggagtgcagtggcgcgatcttggctcactgcaacctctgcctcccaggttcaagcaattctcctgcctcagtctcctgtgtagctgggattaacaggtgtgtgccaccacacccagctaattgttgtatttttagtggagaatagagacaaggtttcaccatgttggccaggctggtcttgaactcctgacctcaagtgatcctcccaccttggcctcccaaagtgctgggattacaggtgtgagccacagtgcctggcggcctgcctccctccctcccttccttccttgcttccttcctttttgagacagggtctcactctgtcacccaggctggagtgcagtggcaggatcacagctcatggcagctgccaccatgcctggctaaattttttttaattttatttttagcagagacaggggtctcgctatgttgcccaggctggagtgcagtggcacgatcacagctcatggcagctgccaccatgcctggctaaattttttttaattttatttttagcagagacaggggtctcgctatgttgcccaggctggtcttgaactcctgagttcaagtgatcctcccgcctcagcctcccaaagtgctgggattacaggcatgagccactgcactcagcagatagcttattttctagaggacaaaaatgatgtacagagtagttaagggatctgtccaaggttacatagcttctaataagtgactaaactagggttccacgcaggcctgtataaatgccaaattgttttacttctgcacctttgccaaaatcagaaccagtgactttccgagtctctttacaaaggctccgtttcctctcactctctgccactgctcagatttccatgtaaggacaggattagcccaacacttagctgtgtctttctcacttggcttgaggaagtgtgatgaggggacaatggggtgagggttgagtttctttgctttctgatcatttcttgatttccatctgatctatgatcagttggatgccattccccagcctggccacaaaaaggcctgttctctttcatagttggaatgtatttaaggttggtgattacaacatacaaggctgggaacattgctgttcttccctccaagtttttggttgtatggggtacatcctggagcttttaaaatatcctcagaaataggcacaatcagagaaccagatggtacttgaatgactgaagtttggcgtgtactgttcaaacacacgctcctattgtgttaacattctggaaggtctcattaatcttctaattaaactgtatcttccaaacccatttattaaaatttacagccaggtgtggtagctcaccccgtaatccctgcactttgggaggctgaggcgggcagatcacttgaggtcaggagttccagaccagcctggctaacatggtgaaaccccatctctactaaaaatacaaaaaattagctaggcatcgtggcatgcacctgtaatcccagctactcgggaggctgaggcaggagaatggcttgaacctgggaggcagaggttgctatgagccaagatcacgtcactgcacttcagcctgggtgacagagcgagactccatctcaaaaaaataaataaataaaataaaatttacaactgcctatgtagatcaataagaacattttgcatatttatatatgcatatgtataaaagctcaccagttgggaagtatgttttattttttaaaataataatattatatatataataaaagtgagacaagcagatttggacaggtgtgaaagccaaaaggaatgaaactggtcaaattaaaccagtgagttaaagaaaatgagttagccttggagaggaaagtttatacaattttccttttagattctccacaactttgcaaatatacagacctacagggtgctatttcccaagacctaggacttactcactgctgtgctggaatgtacccctttgtctaattgcataaaattagacaaatctcatcctccaaatctcatcctctcattccaaatctcatcctccccacaccttattgttcatgaaagccaaagccagctccattcactggctaaacagtagctgcgactacaggcatgggccaccatgcctggctaatttttttgtattttttgtaaagactgggtttcaccatcttgcccaggctggtctcgaacttctgagctcaagtggcctgcccacctcagccttccaaagtgctgggattacaggcatgagccaccacgcctggcctaggacttcttgtatgttggaaactgaggggcactcaggctttcctgctcaaaaacacctccctaccggcctaaaattcaacagtttttgtcactagggttccttatgaaaatgttaatctaatacctgagcagaactgcacattaactcagaattttctcatgggacaagatgggtataaacagatattatatcaatattaattatcatattccttagacatagaaaagcaaccaatctgcccccttttaagggcctttcccagaagtgccatccagcaatttctactgataactcattggacagaactatgtcatgtggccattgtaactgcagggaacttgaaaatgcgtgtgtgtttttttaaagtcaagtccaagtgtattgaactaagtccaggcctctctgaactgagttggagatcctttagtaaaagaaggggagaaatgatattggggtaggcatctagcagtgacttgtagaaaccaatggtccatctggtatagggcttcatcttggtatatggcataccctgatgagacatcgtgcctggcctctaatatgctatcctgcaatgaaccaatcatagtcatgaaaacctcatatcattacagactcacatgtatcttcctagacacttcttctggtaatgaatatattttcaatttatatacgattctttctctggttatttaataagttagtgagatttaaaaatgtattaaaattgcttcagatccatcactgtcatgaatgatgttagaaaatatttgccagaagccaaacatttgaacagctttaaccatgacatcagaaaaactacaattacattcaggaaagagctgcttgatgtgtgacattaaaatgcagttccccaggcaactgagagggagatacattcaataacaacagagcttccatgaattgctaagatcttacagaatttgcaacaccttttatttatttttcattgacagttaaattacaacttgaaagcatctgctgactagaaaacaaatcctctgctctggataaactaggcctcctcccaaaataactactaccgatagaggagctcgggagaagtggggagcagtggaaatgtgcagatgagacatacagccctgccatcggacactgttgtgttggagataatgctctgcagatagatattgatccatgtctagattgtcccttcctcagatgatagagccctgacccagtgttctcatcatacataagtttgaaagccttcttgatgaatggtgtcatttcgcaatgcctagttgggaactcagcatatgggcttttaatagtaaattgcattcagtgaaatgcatcttttgaggtatcatttcatagttctgtcatcaggtgttgcactaagtacattaaaaaatatattagcccagcacggtggctcactcctgtaatcccagtattttgggaggccaaggcagaagaatctgttgaggcctggagtttgagaccagcctgggcaacaaagtgagacccccatctctaaaaaacaacaacaaaaaaaccaaactctagttgggtggtggagtttaggtgtgagagtttgagagagcaacaatattaaatggtggctcactcctgtagtcccagctactggggaggctgagctaggaagattgtttagcccaggcattcaaggctgcagtgagccatgatcatgccactgcactccagcctgggcaacagagcaagaccccttctttaaaataaataaataaacaccaaacttgtagtatttacaatacagttttacctcagttaaatcactctgttgctgaaaatcttgaaacaaactataccctattgacttacattataattaaaaaaaattttttttctattttcattaaccaaggaacagaaatgttttatttcaacttttgattaattttcagttaatgataagaaacagcactttaaactgggtgtggtagcacgagcctgtgatcccagctactcagcaggctgaggcggaaggatcacttctttttttttttttttgagacagagtcttgctcttctcccaggctggagtgcagtggcacagtctcagctcactgcaaactccgcctcccaggctcaagggagtctcctgccttagcctccccagtagctgggattacaggcatgcgccactatgcccagctaatttttttatttttaggggtttcaccatgttggccaggctggtcttgaactcctgatctcaggtgatctgcccacctcagcctcccaaagtgctaggactgcaggtgtgagccaccacgcctggccgaggatcacttcttgagcccaggagttcaaggccagcctttgcaacagtgagactccatctcaaaaaaaaaaaaagaacacttcaagttttctgtctatacttagactctcttaagtaaagcagcaccaaatattatttttttttccccaagggatctgcctttttaaaaatttttaaattttttcttttttcactggttgtagcaacaataaaatctaggggaacttgctagaattaaaatattgcttttgtataaagacatttttgtcattaataatggccaatacttatttttcaaattgtatatgtctaatactgttgctctctcaaactctcacaataagcctatgacaaagactctatatataatactcattttacagaggaggaaccaggcttaaagaaattaagaaacttgcccattgacaacaaagataattgatggagccaggccatgaacccagacagtgaaactgaaggttgtttctttaccaccgcatgacatggctgttaggttttttctacatttttccttttgttgcgctacttttggtttcatttctaagaaatccaattgcctaactcaaggtcttgaagatttatgcctatattttcttccaagagtttaataattttacctcttacattctgattttcttttgttttattttttagagataagatctcgctatgttgccccggctggcctcaaactcctgggctcaagacttctccagcctcagcctccagcatagctgggaccacaggtggctgttactgcacctacccgatgagtttatttttgtatatgttgtgagatagaggttcaacttcttccttttgtatgtagatatccagtcgtcctagtatcatttgttgaaaagagtcttctttccccattaaattgtcttggcatccttgtcaaaaatcaatcaaacataaatgtaaggattaatacacttgtgtgatatatttgattacattccctcacattcattgagttctttacctcaggaaccctaattatccttacactggatcatctttgtcttctctaatagctttcatgtttgtcttttgttctgtattcactctcacgtctttccttatgtcagcaattacagtttcagcagtatctactttgtacatggttctttctaattgattctataataatgatggtcctcaatttattttgttgatccatagctcccctttcaattctattattttggcttttgtcttattaaattcatgatttttgtttgtttgtctgttttttttagactgagtctcgctctgttgcccaggctggagtgcagtggcgtgatctcagcttactgcaacctctgcctcccaagttcaagccattctcctgcctcagcctcccaagtagctgagattacaggtgcccaccacgctggctaatttttgtatttttaatacagacagcgtttcaccatgtttgccaggctggtctcgaactcctgacctcaggtgatcttcctgcctcaacctcccaaagtgctgggattacaggcatgagccactgcacccagcctgaatttatacttttattgagttagtctctggcatcaaacattcgtgaggaattttcttctgttccatgagatttgctttcttcttagttgcattatttgcctttatgtctcctgcatgccatatgatgttcccccttggttttcttttgttttgtttggctggtgtgtgtttgcacggttgccatgctgtttctctgccccctgcccatgcttgggaggctgtttcctgacactgcgtatctctgatattgttgagacatcttcaggtttttccatgataacagaagcccttttgttttcctgactctgctgcagtctggagcttgaggagctgtgttgcatcccttcttctggggtaatgtggaggcagggacagagttcagcagcgctgaggtgcactttctattagcatccctcttagcatctgcctgttcttctgagatggtattgcagattctctaccagggacacatgtctgttagggtatcctttatgggtacatttaggctttggatggcttattatactcaatatgaggctcttgggccttttttttttttgagatggagtctcgctgtgtcatccaggctggggtgcagtggcgtgatcttggctcactggaacctctgcctcccagattcaaatgattcttctgcctcagcctcctgagtagctgggactacaggtgcctaccatcatgcccggctaatttttgtattttttattagagacggggttccatcacgttggccaggctattcttgaactactgacctcaaatgattcacctgccttggccttccaaagtgctgggattacgggcttgggtcaccatgcccggccaccttttctttgtacctttctaccttgatccaaaatctcctccagagtttgaatttcaagtatagagcctccatcaagttcacttaaatttgcttttttccaattactgttgccaaatacccaatgttagtttgtctattacccttggtgtttggacaaattgaaactgtggttttcttctgctgttataccacaacaacagtcaacacagaagactctgtgaccaaatgggtgggggttttctcccacacaccaagcaggggacatcagctaggtgtcctccctcttatttaattcaattctgattctgcctacctggagatagctgtagatcccacaagttgaaggctcagtccccaacactggcccctcctttccaccactcacaagtctgggcctctggaacttttgattgactggcttcaagttggggtttccacaaccccctctttgggttcaattaatttgctagagtgactcaaagaactcagggaaacacttacgtttaccagtttattatgaaggatattacaaaagatacagatgaaaagatgcatagggtgaggtatggggtaagaggtatggagtttccatgccctccctgggcacaccaccctccaggaacctccacatattcagctgtccaaaacctccctgagccctgccgtctgggccttttatgttcgttgtataggcatgattgaagcatggacagccgtgtcaaggtgtgattgacctctctgtgcagccatgcttcctccagggtatgaggcaggaccctgtttgcaatgagggtttatgatccgtaatcagaaaggcgggagatgattagagtcctgcctttagtgagtggaaggggagcagaaggtgagagagagagagagagagagagagagagagattgattctattttctgaggcctaaagtgccccaacattgtaacaaaagactgtgagttatgaaccaggtactatggctgaaaacctacatatacatgtatcatcatatcacacttggcaaacaactctttgtacatttctgtagcactgcagtgttcagtctctgacttggtgtgtctttctcatctgcctctttgttctgctgctgtcctagaaattagagactttaaaaaattccttggctttttggtagaaagaaactcccagactgggtccaagctgaaaatgaatcccttactgggtgaaaaacatggatgcggtaacaattcctggctgtaaatgctcataatattactgttgaaccattttatgctaataaattatctgggacctacttcccttttggtttattcctctttttttctcctgttgctacttataaccatccttgtcaactatctacattttactattaaattattcatataatgttggtgatttcaaagttttcttgtattatttttgggcatttggccgaaaggcactgcctccattttacaagttagcatgtatccagaggccctgtcctgcaacaaaggtgcaggtgcctcagtggcaatacgtgtaagaaaatgttaatttttagggtaaaaatttcattagaaactgtctttgtggaatacaatattagttaatctttacacatgtttttaaaggaagacgaaagattgccactaaaaataaattcgtactgaaagcatctctatctactctctccatttttaaagtacctcacttagtatctttgttttcatttgttaaatgcaaggtcatcctttgaatgttgtcttcaactatgcttgaaatagcttgagacccagcagataattctgaccaggaggtatcagcagacagtgggcagcacagttagaggaaaaaaatgttgcagggccccactcccaataaaaacctacaataaaaaatttaaaaattttaataaagaggaaaatgacaaagaggttttccaaaggatgttcatattctctatttaaaaaccccactgggccgggtacggtggctcaggcctataatcctgagccctggagttcgagaccagctttggcaacatggtgaaaccttatctctaccaaaaatacaaaaattagccagtctcataacccgctcttaaataaatagattaaaatttaaaaataaataaataaataaataaataaataaataaataaccccactgatatgaacatttcttccattttggagtaaaggtgcctacaaggctaggcaatgtccatatttctttcctgaatgtttccaacggggctgcgcctagagcagatgtatcataaatactaattacttattataatgaccaagctacattgttagcatagaataattccacaggcttccctattggtttgtttgatcctaagcctattaatacctgcttctatgtcagaaaatctacattaggccaggcatggtggctcacacctgtaatcccagcactttgggaggccgaggcaggtggatcacctgaggtcaggagttcgagaccagcctggccaacatggcaaaaccccacctctcctaaaaatacaaaaatttagccgggcatggtggcaggtgcctgtaatcccagctactcaggaggctgaggcaggagaatcgtttgaacccaggaggcggaggatgaagtgagcctcaaaaaaaaaaaaagaaaaaaaatattattttgatacatgttttaaagctcaccttcggcattatgagataatccctcaagtgaggaaaaaggtccatttattaatctcaaagaaaacagttacagcagatgtcactggttaagagttcagttggtgaatagcatttcacaatttgtaccaacatctggggaaagacgctttgcatggaactgtaaaacaattgagcaccaaatctgcacaactgcgtttctagaaaatgcgatgggttttatagagatgaggtcttgctatgttttccaggctggtctcgaactcttggcctcaagcgatcctcccgcctcggtctccccaagcgccgggagtacaggcgtgagccaccgacggaaatggattttaagtgaaagtcctatcttcgtttgcaaatcaatttttccaggatcaaagttctagcaaccataaatcctatccttctagacatagggacccacataagggccacttgatgtgacacttgccccgacagcggtgccacctggcccctaggtggcaggtgcgtttttaactaaacccaagagtctgaagtcacattattctcttgccttgaaagcttaagagttggttcctaatcggtggcttaactcggtctctctccaggcaaggccacctgtttgctgatctttcacagggcgaggggaccggagcccttcaatgcagcgccctcttggcctgaagagggggcgactgggcgcccagaccgcgtctttctcactgagatcccagctcctggacgactgcctcttttcgggttcggctcattccgcaataagtggaggggtcccgcctgatcctaggggccggcgcccttttccttccctccctgcgcttgcgaacccctccgggcgtctccggagccgcgacccctgctggggaccccgggggcgggaggccgaggggcgcggcgagggccgtgacgcgaggcggggccggccaatgggagcgctccgcggcgcaggctgagccgccgggccataaaaaggaggcgcggccgggctttccagcctgtggccgctcccggctcggagtgtgatctaagcaggttgcgtaccttcctcaggtgactccggccacagcccattgtccgcggccaccggcggagtttagccgcagacctcgaagcgccccggggtccttcccgaacggcagcggctgcggcgggtccatggagaagggccctgtgcgggcaccggcggagaagccgcggggcgccaggtgcagcaatgggttccccgagcgggatccgccgcggcccgggcccagcaggccggcggagaagcccccgcggcccgaggccaagagcgcgcagcccgcggacggctggaagggcgagcggccccgcagcgaggaggataacgagctgaacctccctaacctggcagccgcctactcgtccatcctgagctcgctgggcgagaacccccagcggcaagggctgctcaagacgccctggagggcggcctcggccatgcagttcttcaccaagggctaccaggagaccatctcaggtcagtgcgcccgcgggctgctagagcgtgcgggcggcgggggcggtgcttgcaggaaacgcgcgccggctccaggaagtttccggagttgcctcacttttggcgcaggaagccgggcgctgtcacctccgaacccgccctagcctgccgccctgccgaggccctgcgtggggcacagtcggggcttcctgggtggcagcgacctctcagccccggaactcgctgcagccgccttccaggggcccttcccgctcccagcgcgcagccctcctagaacgccccgggtgggcgtggacgggagcccggagccctctcgcctgagcgcccagcgcgggattctcggggtacctgcggttccaaacttgcccacgataaggatcacctgggcacttgctgcggcgacggcttcctgggtagttccttattgagatcccattgtcagggtgtgtatctggattgaagcctcggcgcgatccttccccgaaacctcggggacctgcattcccactgatttgccaggggatcggagtcttagagttgtgcttttttttttgtccacctcaagtttactccagttcaggacatttacaaaattcggcacaattttgggcacgggcttccccggagtttgaggtgtgaggttgattgggtgagtttgctgctgaaatctgtttcctccccccacccccaaccccgcaaaaagcagtaaagctactccgggattcggagggctccgtgggttccaggactcagtctcatccccgcaccctcccaccctaaaataaagccgggttgacccggtgctgttagcgtctgaggcgtgtcggcttttcacccagagggtggggatgcaatcagtgtgggtaggatgcaagatggggtgatggagagtggaaaatggggactttgctgcctgttggccagagaagcagtattggtctgtgtttaaaaaaataaagcttctggcttctacagctgggaccaaagacattattttccagtctacaccttccgtgtgtcttggtgacatttatttatttgccctaagaagcattctaccgttcactgttttttgaaagaaaaacagtgcgctggaaaggcaatctccctgccccagttatttctctgaaggagtgtagagcgattccaccaaatagaccctgggaaaaagaaagttattttttgcccagtcttccacaccccaaaggaagggtgggaaatcagaatgtgaaagagacggggccccaaaaggaaatgatgctacactctaaaaccggcagtgacttctagttctgtttccaaattcacttttttttacccctcaattgcaaaagtttggaatctcagaagagatttcaaaatacaaagactgaaaaataaactttcagttttctgtgggatcagctctttggaggtctagggctttaaatttgtgtgtgtgtgtgtgtgtgtgtgtgtgtgtgtgtgtgtgtgtgagatatttcacaatgtaatgaaatgtcttcttaaggccttactcattttgccccttgcagacacagaaagtggtttacttcacagcatcggccaggctttgggaatcctcccttaaagagaattcataggacagtgttctgtaatctagcatggatctaattacccaaagagagaggaatttctgaccctgagacaggtcacagaattatctaaagtgactcacagatttacttgagaaatggttagctgaaatatctcatgagcgaagattcatttaaagaggattaataactgcaaagaacacatcattccacattagaaaactgttctggttggccgagctcggtgctcacgcctgtaatcccagcactttgggaggccgaggtgggcggatcacctgaggtcaggagttcaagaccagcccggtcaacatggcgaaaccccgtctctactaaagatacaaaaaaattagccgggtgtgatggcgggcgcctgtagtcccagctactcgggaggctgaggcaggagaatcacttgaacccaggaggaggaggttgcagtgagccgagattgcaccactgcactccagcctggacgacagagggagactctgtctccagaaaaaacaaaaaaaacaaaaaaactgttctggtcaagttttactatttaaaaagtccatgggccgggcgcggtggctcacacctgtaatcccagcactttgggaggccgaggcgggcggatcacctgaggtcaggagttcgagaccagcctggccaacatgggaaaacccattctctaccaaaaatacaaaaattagccgggcatggtgtcaggtgcctgtaatcccagctactcaggaagctgaggtaggagaatcatttgaaccctggaggcggaggttgcagtgagccgagatcgcaccattacactccagcctgggcaacaagaactaaactccatttcaaaaaaaaaaaaagtccatggatgtagagacactgcaagattagtagttgtcagggactggcgagaagagggggatgggtagtgattgtttaatgagtatggagcttcctttggagcttccttttggagtcatgaaaatgttctggaactagagagtggtgatagttgcacaatattgtgaatgccactggattgtaacttcaagatggctaaaaatgaccaattttatatatattttaccacaatataaagacaggttttgtggcgtgcctgcagtcccagctactagggaggctgaggcaggaggatagttgttgctcaggagaacagcctgggcaacgtggggagaccctgtttcagaaaagaaaagtccatggagcggaccatttaagattattattattatgtttattttcatgtttttgagacagggtttggctctgctgcctaggctggagtgcagtggcgcaatctcggctcactgcagtctcactctgctggactcaagtgatcccacctcagcctcctgaatagctggaactacaggcttgtgccaccatgccctgctaatttttgtatttttgatagagacgggtttttgccatgttgcccgggctggtcttgaactcctgagctcaagggatctgcctgccttggcttcccagagtgctaggattacaggtgtgagccaccatacccagcccatttaagattattataagccattaattgaatataatcatgcattacattatgatgtttccttcaatgatggaccacatgtatgaaggtggtttataagattacaatggagctgaaaaattcacattgtctggtgatgtcttggtgatcctgacctgtgtaggcctagagtaatgtgtttgtttgtgtcttagttttttcctctcgtctcccccatgtcttagtttttaacaaaatttaaaaattaagaaaattgggccaggcatggtggctcacacctgtaatcccagcactttgggaggccaaggtgggcggattacttgaggttaggagttagaaagagaccagcctggccaacatgttgaaaccccatctctactaaacatgtaaaaattagccagatgtggtggcgcatacctgtagtcacagctacttggaaggctgaggcaggagaatcacttgaacccagaaggtggaggttgcagtgagccgagattgcaccaatgcactgcagcctggttgacagagtgagactccgtctcaacagtaaataaataaataaaaataaaaattaaaattaaaaatagaaaaaggtatagaacaaggatataaaatatttttgcacagctgtacaatgtgtttttgttttaagctgtgttattacaaaagagtcaaagttttaaatacattaagctgaaattattgaagaaaaaatatgtttagtgtagcccaagtgtacagtgtttataaagtttacagtagtgtacagtaatgtcctaggccttcacattcacttaccatgcattcactgactcacccagagcaacttccaatcctgcaagctcctttcatggtaagtgccctacacagacataccatcttaagtcttttctactatatttttactgtaccttttctatgtttagatgtctttctaaaattattattatttgtattttaaatatagaggcagggtctcactgttttgcccaggctggtctcgaactcctgggctcaagtgatcctctcctcttggtctcccaaagtgctgggattacaggcatgagctatcccacctggcctacatatctttaaatacacaaataccattgtgttacagttgcctgcagcattcattacagtaacatgccatacaggtttgtagcctaggaataataggctctaccgtgtagcctaggtgtgtaataggctatctcatctaggtttgtgttagcactctcttccttcagtgtttgcgatatgaaactgcatttctcaggtgtttctcagaatgtatccccattgttaagcaatgcatgaccgtactttttaatgggttaaaagctttacgttggatggtcttggttcatcttccagttttcaagtaaacatttctcttatccccatgacaaggcaactgaggcagagaggttgacacaagtagtagagctggtatttgaatccagagagtctgactgcagaattcttagccacttccttatactgctacagagagaactgaatcagtgtaccctatctgtatatttcaaactgtgaattgggtcaacagcattaaaaaaaaaagtggagtagccgggcgcggtggctcacgcctgtaatcccagcactttgggaggccgaggcgggtggatcacctgaggttgggagttcgagaccaacctgactaacatggagaaaccccttctctactaaaaatacaaaaattagccaggtgtggtggtgcatgcctgtaatcccagctacttgggaggctgaagcaggagaattgcttgaacccaggaggcggaaattgcagtgagccaagattgcaccattgcactccagcctgggcaacaagagcgaaactcagtctcagaaaaaaaaagtgagtagaggttgggcacgggggctcaagtctgtaatcccagcactttgggaggctgaggtgggcaaataacgaggtcaagagatcaagaaccccgtctctactaaaaatacaaaaattagctgggtgtggtggtgcgtgcctgtagtcccagctacttgggaggctgaggcaggagaatcacttgaacccgggaggcggaggttgcagtgagccgagattgtgccactgcactccagcctggcgacagagcaagactccatctcaaaaaaaaaaaaaaaaaacaaaaagtggagtagaatggataagatcagtctatcacatatagtaaggacaagtgttttgagaaacttcttcttttgttttttttttttttgagatgaagtctcactctgtagcccaggctggagtgcagtggcgcgatctgggctcactgcaagctcggtctcccggttcacaccattctcctgcctcagcctcctgagtagctgggattacaggcgcccgctaccacacccggctaattttttttttttgtatttttttagtagagatggggtttcaccgtgttagccaggatggtcttgatctcctgactttgtgatccgcccgcctcggcctcccaaagtgctgggattacaggcgtgagccaccgctcccggccgagaaacttctatgtaggttttataggcataattgtgtgtgtgtgcactggctccagatgtaaaatgcatttcttactgtaggttgtagtcaaaagtttgaaagcctgtatctaggggatctgtttaaggatttaatatttcttttttttttttaaagagatatataattaaagagaagacagagtagtgagaacaaggatgatgctgaacttaaaggaatgaacctgaaatgtggtggggtcttggaccaacctggatggcagggagaaggaaggatactggtgggagataggagtgagtgggaacccacatctttaggtccataaacgcttctgcacaatcccttttatttctttagagagcatgagtcaagtggccactatatattgtttttggataagaacatacttctctgaaggtcacttttctgtgcttgtaaacaggatacaggactttatatcttttatatatctgtattctatatattaactcctggttagtaatgttgacttaagtgttgtaaaatttaaaataagttggtattttacattcttcaaaatccatttttcctcccagtgcctcttgtgtggattgatccaaattcctggcattctggggaatttgttcagttttccctacgttgcagcgtctctccatgactgtctccttgtgcaccttttccctactttccagtgtgtaccttccatgggagcatctgtggtcatctgtgaccagggtggtgtcagggttgtataggtttcctagtactattccctactggactgtagctcatgggctaggagggagggctggaggagacgctatcatctctcccaggaactggctgtcctttgaatctacatcacaagctgatccttggaccagctcagaccagctcgtcttgatctatttctgtgccatttcagtttagctgtatcctagttctcttaaatattcaaggttttatcttggtgagttctcctttctatataaggtacctttcctgtatttccactattcttttattcagaacctacacttagttaaattggagagtctgctattctctgagggccttgatcttcatgcccctgtaactgacccttccaggtatacatgggaacagcctttcagacagcattatctaccaaggattaaatgggtataacttgttccatcagttgttttttatgagtttttgggaatatgcaagagtcttgactctgtcacatttccagttaaagtaggttttagcttgtctgccaagacagtttttataaatcatgttaacagttcaaaattttgggaagcatgcatataatccagcgtgaggagatggcattggagatggctgactgcttccctgtgagggctgaggaagcacagacactggcagtgagtcatatccccacctcagccattttcactggaagattatgtctattcgctaaagataatgggaggcaattagatactttgtttatacaaaaatgcatcttagacacttcatactgaaatgtagcaatcacaaaaggtttttctttttgaatcacaaacctctcggatttattaaattagactgctgtggtgaactaagaattttaacaacttctaagatgtgaagaggaacaaaaacataaactatttactattctctcctatatcatgggtgaaaggtgagtttatatcccaagttttaaagtatattatagaaatgctcttctcatcattaaaaggtactattttagatgtgtagctcactcaaattttgatccattaataatttttgtgcttggtttgttaatgaacacttatataggacttagttgtgttcattgccagaaagagcactgtgaataaagaagaaaaaataacaaggcacttttgacatattatatgattggaattttggacatgtctaagtggaataaaacagttaagaagttactgagaaagggggagaaaagccaatcctaatagtttcttttaaaaatggattatctataaacaatttttctgacatgggaagaaaaatcaatatacataacttcactatagcaagcaaagccttcaggttggtactcgtactagattcccagggctgctatcacacagtaccgcaaactaggtggtttaaatgacagaaataaacagtctcacagttctagagactaaagttccaaaatcaaggggtcagcagaaccatactcactccagaacctgtagtgggggaggctgtccttgcctcttcccagcttctggtggtggccgtcagttgatggtgttccttggtttgagctgcgtcactccagtcgctgcctctgtcagtgtccatgtttttgttttgtcttataagaatgtcagtcatatgaggcagggtccactttactccagtatgcctgtgttagtttagctaattacatctgcaacaaccctacttccaaataaagtcacatgctaaagatacctggggtttaggacttcaacatatcttttttggcgaatggcacaattcaacttgtattagtactaaatactattattaaaaaaattagtaggaattttactacaatttcattgatcatcaagtactacgcacttcactgaacgctgggaatgcaggatgagcaaaaccaggtatagttcctgccttcatggaacttacagcctagcagatagaatcacatgaaatagaaatgtgttgtgagattgagaaatgtgatgataaacaaaaacacagctcagtgagagcacttggcataggaacttgaccaatgccaggagatgggagcatgaatgggtgaagcgatgcttaagccgactgatgttctgagtaacaaatactgctgatggcttactttgtgctaaacagtgagtttttacatgtgttacctcatttgatcctcacagtagcacgatggggtaggcaatattattcccattttatacataaggaaattggggcacagagagaactttcccaagactgtatcttgaaagtggcggagctgagaggatgatatagaaagagaatcattgtaatctctggtaggtgatttaattttaataataatattttactgatttatttgaatgatttctcccttcttcctcacctatccccgcttttgtattttctctgctatttgctttgtccacctctagaaacccttccatgcctgggcattccccacctgactcatttgccagtgatttctatatgaggactgtaatttgagtctagtatttggttgagtagactgcagtgttaaaactcaccaggagagggcaactgtctaatcattggatcccagattatgaatcctggattatgtgaacaattctcagttccaggttatgcaaacaaatatgtttcccatggttataaatttgctagagtctatagtaattagattgggatataatttgtgttgggttatgcaaagagtatctgaaccaagttaaatctgttatactcaaggccaagaggacattcatttactagaattttattctattggagcccattagtagaaatatttatttatttggaggcagagtcttgctctgtcacccaggctggagtgcggtggcatgatctcagctcactgaaacctctgccgcccaggttcaagcaattaccctgcctcggcctcccgagtagctgggattacaggtgcccaccaccatgctcggctaatttttgtatttttagcagagacagggtttcaccatgttagccaggttggtctccaagtcctaacctcaagtgattggcctgtctcaacctcctagagtgctgggattacaggcatgagccaccgcacccggccggaaacatacaatgtttgtccttcatgtctggcttattttactttgcaaaatgtcttcaaggttcatccacattaaaaacatctattttatttttatttttattttttgagatagagtcttgctcttccgcccaggctggagtgaagtggtgtgatcttggctcactgcaacctctgtcccctgggttcaagcaattctcctgcctcagcctcctgagtagctgggattacaggtgcccaccaccatgcctggctaatttttgtatttttagtagagactgggtttcaccgtgttggccaggctgttcttgaactcctgacctcagatgatccgcccgtttctgcctcccaaagtgttgggattacaggcgtgagccaccacatcagtaattcattctgtacaatgttgtatattctcaacacatattatattttaatttccttatttcaagaaaaccttagaattgaagatacagtagttccccttatccttggggatctgttccaagacccccagtgggtgcctgaaactgagggtagtaccaaactggattgccatcattcagaataaatttctgtttgtgtcttctacccacaaatttcatgccttttccatcttaactaagcacttaccatgtgctgtggccatagcttttgcagtctgaagtacaataacaatactagcatgaatttttttttcctccttcacagtttcacagatagaagatttgttcttaatatagttttagcaacctcagcgtaatgattttgttcattaataaactgagaactttaatctttttcacttgaaggaaacacagcttctctttggcataactgaattgccaacgtcactactcttgtggtttagggccattgttaagtaaaataagggttacttgaaaacaaacactgcaaaactgaaggttgatttgatcactgagatggatactaagtgactattaggtaggaagcatagacaatgtggatgctctggacaaaggattgattcatattctgggcagaagggctggagatttcatcgcaatactcagaatagcgtgcattttaaaacttatgaattgttggctggatgcgatggctcatgcctgcagttccagcactttgggtggccgaggcaggtcactgacttgagctcaggagttagagaccagcctgaccaacatggccaaacctcatttctacaaaatgtacaaaaattaagcaggcatagtggcatgtgcctgtaatcccaggtactcgggaggctgaggcacgagaatcacttgaacccgggaggcggaggttgcagtgaactgggattgcaccactgcattccagcctgggtgacagagggagactctgtttaaaaaaaaaaaaaaaaaaaaaaatgccaggcatgatggctcatgcctgtaatcccagcaccttgggaggccaaggagggcgtatcatttgaggtcaggagttcgagaccaggctggccaacatggtgaaacccccatctctactaaaaatacaaaaaaatttgctgggcatggtggtgcacacctgtaatcccagctgctagggaggctgaggcaggagaattgcttgaacttgggagccgaaggttgcagtgagccgagattgtgccactacactccaacctggatgacagagtgggactctgtctcaaaaagaaaacaaacaaaaaaaccttatgaattgtctatttctggagtttttcatttagtattttcagaccatgtttgaccaagggtaactgaaactgtgaaaagtggaactgtagatggtctctatgagtagtcactgttaaaggggaaacaaagatgattgttggcctgatcttggccttcaaggagtaaaggggttctgtgtagtcagagggaagctgggtgcttctggtggagagacaggaaagtccagatgttatggagaaagtagcttttgagttgaacctagaaggaaattcattttgagtttttttgggttgtttgttttttgcagaacgtgtccatgctggtttagagattatggtctaagtgtttttcaataaaaggcatacactaacattcatagttacctgtaccagagttaaaattaaatggagttttcaaggcaattagatttattttaaacttttaaaagatcaatattaatggcattagggccagctcctttatctgatgtctttaaagttcattctggccatagtcaacccttgtaatgaattttaacctgacacatgttgctacttcatctagtctttgtaacctggttatttatttattttttgagatggagttttgctcttgttgcccaggctggagtgcaatggcgcgatctcgtctcaccgcaacctccacctcccaggttcaagcgattctcctgcctcagccttcccaagtagctgggattataggcatgcgccaccaagcctggctaattttgtgtttttaatagagatggggtttctccgtgtgggtcaggctggtctcgaactcctgacctcaggtgatccgcccacctcggcctcccaaagtgctgggattacaggcgtaagccaccgctcccggcctggttatttgttttatctgcaattattctttctcgtgaatccccttggctaatcatgctcacaaagttctgacacatataccacctgaatatttctagaatctgagtcatctttcacttaaattacaataacctcttaactggccttcttgcctcctagcttgtcctgctctgatccattcatgccaaagtgatttttctaaaattgaataagttttttccttgcaaaaaacacttgattgattttctgttgtctttcctcaccattgctgtgaggttttgttctgttgtagcctcttgctacattttttggcatttttttcttatcttccatcgcatttcctcatatagggcaatttagtattttagtttagtgcatagtttagtgcacagttaatctgagaaaccactctgtctcatttccttgctggagctggagacccaggtgaagatcctgaggtttgttcttttgcaatgtttggcctttattatctgccctcctcctgtaatttattttactgtcctttttgtttttggttggcaaccatggggaggtggctgctgcctcttgcttatcaacaactgttgcttatggagacttctgtgaacaagcagccaggtttaggtgaggaaattggccgtgactgaattctgggtgaatttttcgaggtccagttggtccaaatgtttgtgatgtgcagtcctaagaggccatggctcttcctgtgaagtgtgatgtgttttatgtatcacacattagtttttatttgtcctaagcaggaatcagaactcagttcaatagaggccattggcaaacatcccaaacaaggaatctctcactaaaatagcttaaaatataattttacctgtgtggtctaggcatttgtggtacagtgttcgttagcagtgaggaagggctatgcgtgcctggagatcagatgagaggccttaactcagtgaggtcgctgactagttgactttaaggcatagctgctgtagatcatacccctctaattgaccccaccatttatcgtttatcacatgggcagccctggaggtatgcctctctgatggcctatcaaaaagaatctgcccttcagcttcaaggaacagtttgctgacagcctccagctgttagtgctgtcaggctttgcctccacggaggccatacttatcccatgctgcgtgtcctttcattttggtgtcatctctttctccccttctacccctcctccaccacagtaaacagctttttgagggctggggctgtttataagtgaagtagtttataaaaagtagatgcacatctttcagcttcatatttagcatgttggaaattctgttcactgatctaattctgaaatctccttggtatttcttaaactagttgtataggctgggtgcagtggctcatgcctgtaatcccagcactttgggaggctgaggtgggcagatcaccaggtcaggagatcgagaccatcttggctaacacgctgaaaccctgtctctactaaaaatacaaaaaaaaaaaaaaaaattagccgggcgtggttgtgggcgcctgtagtcccagctactcgggaggctgaggcaggtgaatggtgtgaacccgggaggcagagcttgcagtgagcggagatcatgccactgcactccagcctgggcgacagagtgagactccatctcaaaaaaaaaaaaaactagtatgtcaacaaagctttgtgctgctgtaatgggaagaacagctagcctgggctagtaatatgctaactggtttatgaacttaggtaggtgagtcacttgactattctgggtctgttctgaagggagaggcagtaggactaggagttaaattgtcatgccgaggtctctgagcatgggtgggcctgtcagaattgtcatcgctcactctgttgacttccagcagctgacaggcaaggccctaggaagctcttcagcctcctttccttgctagaggtgctgttttccctggaaatgttcaagccctgcaaatcgtttctatagtaacaggtctctgtcttttttcttatgatgcagatttttgaaaaggtttcttatctaaatgttcttgggatctatggtcttcctacctgtagctcctttgattagacagagcctttatttaaagacttttccccccaagaatgttgttgttgcttctaccaaaataataaccagttgttagttttactagtgcttgaagttttagtttattaataaagcttcatataaactagaaaaggagtggttgggtagaatagtaataccgaaaaaactaatattcactgttagtctcatgtatttgtaaactttaattttttattatgtaaaaccttcaaacataaaagtagtcaaaattatataatagacacctatatacttaccacctagattgaaaactaacattctgccatattggcgtagtttattcgtttactgatagtaaatcagagacatgtatttagaggtgaaatgtcaccctaaaaagcgtttttcttaatgatttacaccacccttagtaaaattagctattcattccttcatatcatctaatacctaatatatattcacatttcctcaggtgtctcaaatgtcttttactaatgattttttccaacaaggatccactcaaggtccatacatttgcatttgattattacgttttaatctggaatagcgcctaccgcccccaacccctgccactgctttatcagagaggtcagttgtcctgtaagatactctacctttatgatttgtatgatttttgtttgtttgttttcatttaacttctatatttctcatattcctggtaactgcaagtcaggtctaaagacctcactaaattcctggaaaacatttttagcaggaatgctctgtacttcatgcactgtcacaactgggagacactaagtatttggatcttgaagatttaaagacttctaattggtttttaaaagccctgtttcactggttttctaggataagcttctctagagaagttcctttttaaaaaatgttttattagtttgaagatttaatgggattttcctttcccctgaaattcttccagtttgatttcaaaaagaaaaggtcaacatagcattacatttctgaattttccctcaaataagccaaataaatagttggtgaaacagtattttgtgactgatgcgcaccactttggttctggcagtctctgggcattaggccactctttctgctctgctctcctggctgacagtttataatggattttacttttcttttaaaaaatcagatttgctgtcttttgctgtcatcagctctgggccttgtcaccacatggcagacttcaacctacaataacccctgatgcgtgtttcctgaaggggacctctccccttcagtccacacttctagtaggttgagttcagcccaagattaaggctctggtctggagtcagaagatgggtcaaaatctagctctcccaccggctggttggctcttcttcagcagtcagctagtgtttccaaatgacagtatctgtgtcctcatctgtaaagtcgggacaataactggtgttttttttgttttgttttgttttttgagacagtttcactctgtcacccaggctagagtgcagtggcgcgatctcggctcactgcaagctccgcttcccgggttcacgccattctcctgcctcagccccccgagcagctgggactacaggcacccaccaccgcgcccggctaattttttgtatttttagtagagacggggtttcactgtgttagccaggatggtctcaatctcctgacctcgtgatccaccggcctcggcctcccaaagtgcggggattacaggcatgagccaccgcgcccggcctataactggttttgactaatgcgagttgtggtagggcttgaaagaaatcacaaactaaatgtaaaatttaatttgaaaaatgctgtccaagcaggaactcacatccaggaacaaaatgaatggagaccagaaatccagatatgtatgcccaagaaaagcagaattttatccaggacttctcccaggttgtcaggatgctgactgaggatgagatggggcacccagagacaggagagtctattacctggctcaaagaggtcctggagtacactgccactggagacaagtaccactagggtttgatgatgctggtagcattccaggagctggcagagcccaggaaacaggatgctgatagtctccagcaggtcctgtctgggctgttgtgtgaactgctgtaagcttgcccgtttttttttgttgttgttgttgtttgttttttgagatggagcctagctctgccgcccaggatggagtgcagtggcacaatctcagctcattgcaacttccacctcctgggttcaagtaattcttgtgcctcagccccctgagtagccaggactacaggcgcattccaccgcacccagctaagttttgtatttttggtggagacggggtttcgccatgttggccaggctggcctcgaactcctgacctcaggtaatccccctgccttggcctcccaaagtgctgggattacaggtgtgagccactgcaccttgtgctgcaagctttcttcctggtggcagatgacatcagggattcatccctcaccttgctgggggcagatctgcttgtatcagaagccaggtgtaggtttggatgccatcaatgatgctatgcttctagaagcatctatctatcacctgttgaagctctgttgctgagagcaaccccattacctgaacctgaaaaagcacttcctgtggagttcctattagacagagatcaggcagaccctggaccccatcacagccccccagagcaatgtggatcttgactggttcactgaaaagaggtacaaatcactgtcaagtataagacagctttctacttcttctaccatcctgaagctgcagccatgtctatggcaggcgtcagtgtggggaaggaatgggccaatgacaggaagatcctgctggagttaggagttctttcagattcaggatgattaccttgacctctttggggaccctactgtcaccactggcagagtttgtactgacatccaggacaacagatgacaacaaatgcagctgactggtggttcagtgtctgcaatgggccacaccggaacagcaccagatcatgcagaagaattacagggaggaggcactatatgaggagctggatctgctgaccatgttcttggtatgtggaagatggttacagccaccttatgggtctcattgagcagtgtgttgcaccactgcccccagccaccttcctggggctagcgtacaaaatctccaagcaactgcaaggcagggagaggaggctctcaataaattactgtgtaatctttttttttgttgttgttgttgttgttgttgttgttttgagacagagtttcactcttgttgcccaggctggagtgcaatggtgtggtcttggctcactgcaacctctgtcttctgggttcaagcgattctcctgcctcagcctcccaagtagctgggatttcaggcacccgccactacgcccggctaatttttgtatttttagtagagatggggtttcaccatgttggccaggctggtctcgaactcctgacctcaaatgatacgcctgccttggcctcccaaagtgctgggattataggcgtgagccactgcgcccggcctactgtgtaatcttacaaaaaaagaaaaaaagaaaacaatgctctaaaagagaagggaattttgtttctgttccatgcatagacctacacaggcttttttccttttgctgtttcccacttccatatcttattttatatggtacttttcttcctttccctttctaggaaaccctccctccacctttcctcctactcgacctttaggcctgggtaaaattttaatcttcaatacaatcatattgttttgtctcagcccacaagttttcatttatgtgaactatcagttttacaatttaacctctagtcattctccaaatatttttacacctaggcctcttatttctgcagatctcaagttgcttgaggtcatggtttgatagatttgttttcagctcagaactatgaaaactttattgtattaccctagacattgatttctaatgagttggttgtaggatgcaactggtttcttaagtgggggatatttttctagaatgtgggtacaactttctgatgtgaggtcctcacaaatttttaaactttgctccagcaaaaagaaccacgtagaggttctctacctgggtccttcctgcctcaccttctttaggtggagttggctccagtttcctccttgtctctgcctccaccccacccctgccccaggcctcatagtgttccacaggaatgacgtggtgactgtagtgagggttacagtgaagaattgcccactgtttggccttgctgaacagcaaatttgggccagcagtgggtctgttttctctcttttctttttatttatttatttttttgagacagaatcttgctctgtctcccaggctggagtgcagtggcgtgatctcggctcactgcaagctccacctcctgggttcactccattctcctgcctcagcctcccgagtagctgggactacaggcgcctgccaccacgcccagctaattttttgtatttttagtagagacggactttgtccgtcttagccaggatggtcacgatttcctgacctcgtgatccacctgcctcggcctcccaaagtgctgggattacaggcgtgagccaccgcaccgggctttttttttttttttttttttttttttgagtcggagtctcactctgtcgcccaggctagagcgcagcggcgcaatctctgctcattgcaaactccgcttctcgggttcaagcaattcatctgcctcagcctaccgaatagctgggattacaggcacgcgccaccgtgcccggctaatttttggacttttagtagagatggggtttcaccatgttggccaggctggtctcgaattcctgacctcgtgatccacctgcctcatcctcccaaagtgctgagattacaggcgtgaaccaccgcgcccggccagcagtgggtctgttttcaaccctcatgtaccctcagctctcaagcctgtgtgctcccaccccagccagtcaccagaatcacatagattttaaaacgacttatcctgggtccatccctacacatagtaaatgagatttttgctgggtagcttgggacgctatattttccaaaactccctgttgattggctgtatttgggaacccctgttgcgaaggaagatcccttatctcttcatctgtcactaatgatggtggcttgcgcactctgatggtacttacttggatgggattacagatggttccatcacacccatctgtatgaaatctcgtggtataagtgaatgtaggatgataagggacgagcctattagaggcttttgaagcaaatggatagtttaatcagattggtgtgttttttttttctgtagaactgctgtgaactagaccttgttatcaccatctgtttcgtaaattccattttcggtttaacagctggattgtgaaagatatacaaaattatccagttaaaaaactaaatttggcaagtgtgtgtgtgtttttaaaaatgactccttgaatacactgttttgattccttagacagtttctaaggctctaattttggtctaccagaaatattcagagtagtaaactgagaccagaaaggcgagttctttggcttggataactttgagagttaatagtatacatgattggcagccttcagttttatccagcaataaatctaaacagtttaaaataagtactttccccttacctcagtacagagaggccctggccactgccatgcacatctcagaagctgagcagtggggcagaaggataacttgtaatttggcatcaatgtccaacacccttgagctctggactcttttattcattccttctactttaccattctacatcttgaaccactgtgcgtgcggttcccctaagaggcagtaaagtaattgcatcagggtggagggattttatgtgctttcactttctcatttgattatttctacatcttaccgataaacttccatgaatattactgttgtaatgaggagcaaaatgttagtaaagataactttatacgtgaaaacttgaactcttaccaagaaacgtagtgtttgtgacaaggctggctgagaggatgagaatagctcatcagtactgggttggctgaaggaaacatgcatgtcagtactattttgagggcagctgagaacatctatttcaatagctttggctatattttaatagctaagagcaacatatgaatttgtctctgccaaagatggagtgaaaatttccaaaataaccaaacttttactttttttgcaatacattaggtctttcctgctgacaaacctacagtttatgaaataagtttgtggagcatatcaaagctgtgcggcagctctgtgcactccagcagatggtgtgactggttgtctgtagtcgtcttagtttccgccattgtgtcagtctgtggaatgtttgggttcatgcttattttggccaagttttccaaattctgtcttggtaagtacaaaaagctgtgagtgtcggaagctctaacaagaggtgtactcatgatgaaagtgaaagcagagagagcgatttttttttcctctttgaatttgttttaacatgctcttacttgtaggacaaatttttcaaacaggtggtagaaagcaaaacatcttaatgccatcttcagggcagaagactttgagttgcaggatgtgatttagggaggattttgaaagagtttgcagcactgcgtgaagctggctgggtcttcctgtgtactcctccttgccctcctcctatagcccctccatgcaaaggtaacctgtttttttaatgtttgtttctttttaaaatttttttatttttatagaaaaaacaaatgccagcatgtgtatgaagaccttaatttaaaaaaatatttttattggcctggcgcggtggttcacacctgtaatcccagcactttgagaggctgaggagggcggatcacctgaggctgggagttcaagaccagcctgaccaacatggagaaaccctgtctctactaaaaatacaaaaattagccaggcatggtggcacatacctgtaatcccagctactcgggaggctgaggcaggagaatcgcttgaagctgggaggtggaggttgcggtaagccgagattgcagcattacactccatatattatggagtatatatatatggagtatatatatatatggagtatatatatatatatatggagtatatatatatatatggagtatatatatatatggagtatatatatatatatggagtatatatatatggagtatatatatatatatgagtatatatatatggagtatatatatatgagtatatatatatggagtatatatatatatggagtatatatatatggagtatatatatatggagtatatatatatggagtatatatatatatggagtatatatatatggagtatatatatatggagtatatatatatggagtatatatatatatggagtatatatatatatatggagtatatatatatatggagtatatatatatatggagtgtatatatatatatggagtatatatttatatggagtatatatatatatggagtatatatatattttatatattatgtattatataatatatattatattatatataaaatatatattttataatatattattaatgaaatttctcacatatacaagactgtatgaacaagtttaatcaaaatacattgggttttgacaaatcttagtattttgctataattgcttttaaaaaatacagatagtttaaacttcctagttatcacttcctgatccagttatcatctcactacagaggtaaccactatactgaatttggtccctaactttctttttttttttgagatggagtcttgctctgttgcccagactggagtgcagtggcatgatcttggctcactgcaacctccgcctccgggttcaagcagttcttctgtctcagactcctgagtagctgggattgctttcatgtctttttttttttttttttttttttttgagacagagccttactctgtcacccaggctggagtgctgtggtgcaatgttggctcacggcaacctccgcctcccagaatcaaacgattctcctgcctcagcctcctgagtacctgggattacaggcatgtgccaccacacccagctaatttttgtatttttagtagagatggggtttcaccatgttagccaggctggtcttgtactcctgccctcatcggcctccgaacgtgctgggattacaggcgtgagccactgcgaccggcctcatgtctatttttatactttcattttctgtatatgtttacaaacaacatgtaacattgtttttacttaatttaaatggctcatactctacatatccttctgctacacgctttttacactgaatatcctttcaaggatttataaatgcagcccaaatttactgactttcattgctgggtcatattttattgtgagtttacccaaactgtgtaattgttcttctgattcactcttctctatttttgctattaccaacaagatggcagtgattttttttttttttttttttttttttttgagacagggacttgctctgttgcccaggctggagtgcagtggtgtgatctgaagtcactgcaaccttcgcctcccaggttcaagtgattctcgtgcctcagcctcccaagtagctgggactacgggtgcatggcaccacatccggctaatttttgtatttttagaagagatgggttttcactatgttggccaggctggttttgaactcctgacctcaattgatccacctgccttggcctcccaaagtgctgggattacaggcgtgaaccactgtgcccagctgaaaattcttatgttcccttggctgcatgaatttctttggagtcccttcatttaaaaatgtattttaaggaagtgaattggtccagcgtggtggctcacacctgtaattcgagcactttgggaggctgaggtaggaggagcttgagcccaggagttcaagatcagcctgggcaacataatgagactctgtctctacaaaaaaataaaaaattaactggatatggtggcatacctctagtcccagctactggggaggccaaggtgggaggattgcttgagtctgggagatggaggctacaatgagtggtgattgcactgctgcactccagcctgggtgacaggacgagaccttgtctcaaaaagaaaaaaaagtgaatcatagagtaaagacagacatattaattgaataaacacagaagatctatgtttaactccagctttgtgcatggtgttacagggaagtgtgtagaagctccaaagccttcagatataatgcttaactcagaaacttatagcccagtgtgtctgtgggacgtgggcacaaataaccatggtactacgaggcatgatgagataagcgctgtatgctggtggaggtagctctgatattagatggaactatgagggtctggaccattctccaccaaatcaggataggcttatctttgttagcaccttgagttgatttaattccagccaaaagcagaggtgtgatgccctaggcacttctctctgtctcttctcttaattttaaaaccagtaggcagactccattagctctttcctatcctttaggatggatgctcactcagatgttccaagtcatcttccactgtcttttaactctgtccttccagggagatgcgtcaggtgtccggcttcctcagagagctggagttgttggtgctgatcaccagatactccagacggcactaattcctatactatgggttcagagggaactccattggacagaaatttccttttgaggaaatctttccctggagtttcttcttacctttttccctcactttctccacagcagaaacaggtctgtttgtccttaaatatttacctatatatttgagtaggagcattttgaagagatgaagtttctgtgtagcagcacaaaacatgaaatagttcaaaccaggggcactctggttctcagaccgggagcttcaggatcttctgggaacttgttagaaatgcaaattctcaggtctgctcagatcacctgaaacagaagccctaggggtggggcctagagatttgtgtcttaacaggcccacagcgggagtctgggaacccctgtttcgaagtatgcttaaataagcacttgggggccaggcatggtggctcatgcctgtaatcacagcactttgggaggccaagacaggcagatcccttgagctcaggaatttgagaccagcctgggcaacatgacgaaaccccatctctacaaaaaaatacaaaaattagccaggcatggtggcttgcgcctgtaatcccagctactcaggaggctgaggtgggaggatcacctgagcctaggaggtggaggttgcagtgagctgagattgtgccgctgcattccagcctgggcaacagagggagaccctgtctcgagagaaaaaaaaaagcacttgggcttgtattgtgggcctgtcttactatactttcagaaaagggtctggcagactaaatacttgagggatgttacccagcagtgttatttgttgacattgcttaattatgaatgacatgagaaaggtatacctgaaaactgacattgtgtggtgttgttgtagacaaacctttaacttgtggaggctgctttcattttgtttgtggttgtgaccaaccgtaggaaacagaatgccataaatccctgtttccagggttaccttcttgctgctgataacaggcaggaaattaaaacaatatgtgatagtgttctgttcttattacctacagatggtagcttttagatatgttggagcaaaacataagtaaatatagcagggaaactttattactgaagaaaaatgatttggctaggtcaaggttatagtctggttcattttaataaaatggggcataggcaacatatcagtgttccattatcacatgaagcatttagctgtatgaggatcactagattttttttctctttgatttaattttgagtatgtaaaacatttacatgattccaaggtcaaaactgtgtaacaaattatattcaaagatgcttccctttcatccatatcccttctgtctcttctcttactgctttgcaggtaatcatttttactagcttctgaatttatccttccagtgtttctttttgcagataagcatatacattcatatgtatatgtcatatgttcatagctcctccttccactttcattacacaaaaggctacatactatactacaattttaaaaattattattattattatgatttttagagacagggacttgttctgtcacccaggctggaatgcagtggtgtaatcatagctcactgcagcctcaaactcctatcctgggttcaagggatcctcctgcttcagccgcctgaatagctaggactataggcacatatcaccatgcagtactttataattttttttttattattatactttaagttttagggtacatgtgcacaatgtgcaggtttgttacatatgtatacatgtgccatgttggtgtgctgcacccattaactcgtcatttaacattaggtatatctcctaatgctatccctcccctctccccgcaccccacaacaggccccggtgtgtgatgttccccttcctgtgtccaagtgttctcattgttcaattcccacctatgagtgagaacatgcggtgctttttgtccttgcaatagtttgctgagaatgatggcttccagcttcatccatgtctctacaaaggacatgaactcatcattttttatggctgcatagtattctgtggtgtatatgtgccacattttcttaatccaatctatcattgttggacatttgggttgcttccaagtctttgctattgtgaatagtgccacggtaaacatacgtgtgcatgtgtctttatagtagcatgttttataatcctttgggtatatacccaataatgggatggctgggtcaaatggtatttctagttctagatccctgaggaatcgccacactgacttccacaatggttgaactagtttacagtcccactaacagtgtaaaagtgttcctgtttctccacattctctccagcacctgttgtttcttgactttttaatgatcgccattctaactggtgtaagatggtatctcattgtggttttgatttgcatttctctgatggccagtgatgatgagcattttttcatgtgtcttttggctgcataaaggtcttcttttgagaagtgtctgttcatatccttgagaagtgtctgttcatatccttcacccactttttgatggggttgtttgtttttttcttgtaaatttgtttgagttcattgtagattctggatattagccctttgtcagatgagtagattgcaaaaattttctcccattctgtaggttgcctgttcaccctgatggtagtttcctttgctgtgcagaagctctttagtttaattagatcccttttgtcaattttggcttttgttgccatcacttttggtgttttagacatgaagtccttgcccatgcctatgtcctgaatggtattgcctaggttttcttctagggtttttatggttttaggtctaacgtttaagtgtttaatccatcttgaattaatttttgtataaggtgtaaggaagggatccagtttcagctttctacatatggctggccagcttttccagcaccatttattaaacagggattcctttccccatttcttgtttttgtcaggtttgtcaaagatcggatggttgtagatatgcggcattacttctgagggctgtgttctgttccattggtctatatctctgttttggtaccagtaccatgctgttttggttactgtagccttgtagtatagtttgaagtcaggtagcgtgatgcctccagctttgttcttttggcttaggattgacttggcaatgcggtctcttttttggttccatatgaactttaaagcagttttttccaattctgtgaagaaagtcattggtagcttgatggggatggcattgaatctatggccattttcgcgatattgattcttcccacccatgagcatggaatgttcttccatttgtttgtatcctcttttattttatggagcagtggtttgtagttctccttgaagaggtcctttatgtcccttgtaagttggattcctaggtattttattctctttgaagcaattgtgaatgggagttcactcatgatttggctctgtttgtctgttattggtgtatagaaatgctcgtgatttttgcacattgattttgtatcctgagactttgctgaagttgcttatcagcttaaggagattttgagctgagacaatggggttttctagatatacaatcatgtcatctgcaaacagggaccatttgacttcctcttttcctaattgaataccctttatttctttctcctgcctgattgccctggccagaacttccagcactatgttgaataggagtggtgagagagcacatccctgtcttgtgccagttttcaaagggaatgcttccagtttttgcccattcagtatgacattggctgtgggtttgtcatagatagctcttattattttgagatatgtcccatcaatacctaatttattgagagtttttagcatgaagcgttgttgaattttgtcacaggacttttctgtaactattgagataatcatgtggtttttgtcattgattctgtttatatgctggattacatttattgatttgcatatgttgaaccagccttgcatcccagggatgaagcccacttgatctggtggacaagctttttgatgtgctgctggattcggttagccagcatttttttgagggttttgcatggatgttcatcagggatattggtctaaaattctctttttttgttgtgtctctgccagactttggtatcaggatgatgctggcctcataaaatgagttagggaggattccctctttttctattgattggaatagtttcagaaggaatggtaccagctcctccttatatgtctggtagaattcggctgtgaatccatctggtcctggatttttttggttggtaggctattaattattgcctcaatttcagagcctgttattggtctattcagagattgaacttcttcctcgtttagtcttgggagggtgtgtgtgtccaggaatttatccatgtcttctagattttctagtttatttgcatagaggtgtttatagtattctctgatggtagtttgtatttctgtgggatcagtggtgatatcccctttatcattttttattgcatctatttgattcttctctcttttcttctttattagtcttgctagcggtctatcaattttattgatcttttcaaaaaaccagctcctggattcattgattttttgaaggcttttttgtgtctctatctccttcagttctgctctgatcttagttatttcttgccttctgctagcttttgaatatgtttgctcttgcttctctagttcttttaattgtgatgttagggtgtcaattttagatctttcctgctttctcttgtgggcatttagtgctataaatttccctctacacactgctttaaatgtgtcccagagagtctggtatgttgtgtctttgttctcattagtttcaaagaacatctttatgtctaccttcatttcgttatgtacccagtagtcattcaggagcaggttgctcagttttcatgtagttgagcagttttgagtgaatttattaatcctgagttctagtttgattgcactgtggtctgagagacagtttgttataatttctgttcttttacatttgctgaggagtgttttacttccgtcaattttggaataagtgtgatgtggtgctgagaagaatgtatattctgttgatttggggtggagagttctgtagatgtctgttaggtctgcttggtgcagagctaagttcaattcctggatatccttgttaactttctgtctctttgatctgtctaatgttgacagtggggtgttaaagtctcccattattattgtgtgggagtctaagtctctttgtaggtctctaaggacttgctttatgaatctgggtgctcctgtattgggtgcatatatatttaggatagttagctcttcttgttgaattgaattgatccctttaccattatgtaatggccttctttgtctcttttgatctttgttggtttaaagtctgttttatcagagactaggattgcaacccctgccttttgttgttttccatttgcttggtagatcttcctccatccctttattttgagcctatgtgtgtctctgcacgtgagatgggtttcctgaatacagcacactgatgggtcttgactttttatccaatttgccattctgtgtcttttaattggagcatttagcccatttacatttaaggttaatattgttatgtgtgaatttgatcctgtcattatgatgttagctggttattttgctcgttagttgatgcagttttttcctagcctcaatggtctttacaatttggcatgttttttcagtggctggtaccggttgttcctttccatgtttagtgcttctttcaggagctcttgtagggcaggcgtggtggtgacaaaatctctcagcatttgcttgtctgtaaaggattttatttctccttcacttatgaagcttagtttggctggatatgaaattctgggttgaaaattcttttctttaagaatgttgaatattggcccccactctcttctggcttgtagagtttctgccgagagatcagctgttagtccgatgggcttccctttgtgggtaacctgacctttctctctggctgcccttaacattttttccttcatttcaactttggtgaatctgacaattatgtgtcttggagttgctcttctcgaggagtatctttgtggcattctctgtatttcctgaatctgaatgttggcctgccttgctagattggggaagttctcctggatgatatcctgcagagtgttttccaacttggttccattctccctgtcactttcaggtacaccaatcagatatagatttggtcctttcacatagtcccatatttcttggaggctttgttcatttctttttattcttttttctctaaacttctcttcttgcttcatttcattcatttgatcttccatcactgataccctttcttccagttgatcgaatcagctactgaggcttgtgcattcatcacgtagttctcgtgccatggttttcagctccatcaggtcctttaaggacttctctgcattggttattctagttagccattcgtctaatttttttaaaggtttttaacttctttgccatgggttcgaaattcctcctttagcttggagtagtttgttcgtctgaagcctttttctctcaattcgtcaaagtcattctccgtctggctttgttccgttgctggtgaggagctgcgttcctttggaggaggagatgcactctgatgtttagagtttccagtttttctgctctgttttttccctgtctttgtggttttatctacctttggtctttgatgatggtgatgtacagatgggattttggtgtggatgtcttttttgtttgttagttttccttctaacagtcaggaccctcagctgccggtctgttggagtttgctggaggtccactccagaccctgtttgcctgggtattagcagcggaggctgcagaacagtggatattggtgaacagcaaatgttgctgcctgatcgttcctctggaagttttgtctcagaggagtacccggctgtgtgaggtgtcagtctgcccctccttgggggtgcctcccagttaggctactcgggggtcagggacccactttaggaggcagtctgtccattctcagatctcaggctgcatgctgggagaaccactgctgtcttccaagctgtcagacagggacttttaagtctgcagaagtttctgctgccttttgttcggctatgccgtgcccccagaggtggagtctacggaggcaggcagggctccttgagctgcggtgggctccacccagttcaagcttcccagccgctttgtttacctactcaagcctcggcaatggcgggtgcccctcccccagcctcgctgccgccttgcagtttgatctcagactgctgtgctagcaatgagcgaggatctgtgggagtaggaccctccgagccaagcgcaggatattatctcctggtgtgccgtttgctaagatcgttggaaaagtgcagtattagggtgggagtgacctgattttccaggtgccatctgtcaccgctttctttgactaggaaagggaattccctgaccccttgtgcttcccgggtgaggtgacgcctcgccctgctttggctcactgggtgcgctgcaccccctgtcctgcacccactgtccgacactccccagtgagatgaacccgatacctcagttagaaatgcagaaatcacccgtcttatgcgttgctcacactgggagctgtagactggagctgtccctattcggccatcttggctccacccccaccctttttttttttttttttttttttttggtaaaaacagagtctggctaggttgggcagtctggtcttgaactcttggcctctagcaatgttctcaccttcgcctcccaaagtgctagaattacagatgtgagccaccgcacccagcctaaaaattatgtttgaagttagctttattaaggtgtcacttatcttatgtaaaatttacctactttacatgtacaatgtgaattttaacaaacgtatgcagttatatagccacccatacagtgaagataggaactatttccatcacccaaaaaagtttctttctttccttttgcagtgaagttctctctcctacctctctggccctggtaaaccacctgtctgccttctatcactatagttttgccttttctagaacataggtagtctcttctgtgtatggatgtcttctttcacattgtagtgtactttggagactcaaaccatgttattacatgtatcagtaattcattccatcttcttgctgagtgtactccattgtttatatgttccagttgagggacattgtccttttgctttttagaaaactttttattgggccaggcacggtggctcacgcctgtaatcccagcactttgggaggctgaggcaggtgggtcacctgaggtcgggagttccagaccagtctgaccaacatggagaaacccgatccctactaaaaatacaaaattagctgggcgtggtggtatgtgtctataatcccagctactcaggaggctgaggcaggagaattacttgaacctgggaggcagaggttgcagtgagctgagattgtgccattgcactccagcctgggcaacaagggcaaaacttcgtttcaaaaagaaagtttttattttgaaacaattttagactgacttacagaataattataaagatagtagagagagttttcatataccctttccccagtttctcctgatgtttaacatctcacatggccatggtacaattatcaacatttaagaaattaatactggctgggcatggtggctcacgcctgtaatctcagcactttggggggccaaggctggcagatcacgaggtcaggagttcgagaccagcctggccaacatagtgaaaccccgtctctactaaaaatacaaaaaaattagctgagtttggtggcacgtgcctgtagtcccagctactcgggaggctgaggcaggagaatcgcttgaacccgggaggcgaaggttgcagtgagccgagaccacgccattgcactccagcctgggtgacagagtgagacttcatctcaaaaaagaaattaatattggagccaggtggtggtgcatgcctgtagtcccagctacttgggagaccaaggtgggaggatggcttgagccgtggagtttaagactagcttgagcaatatatcaagatcccatctctaaaataataataataataataaggccaggtacggtggctcacgcccataatcccagcactttgggaggctgaggcgggtggatcacgaggtcaggagatcgagaccatcctggctggcatggtgaaaccccatctctactaaaaatacaaaaaattagctggggtggtggcagacgcctgtagtcccagctacttaggaggctgaggcaggagaatggtgtgaacctgggaggcagagcttgcagtgagccgagatcatgccactgcactccagcctgggcgacagagcaagactctgtctcaaaaaaagaaaaaataataaaaatatactttattttaaaaagtaatattggtacaatactattatttaaactacagactttattcagattttcattgtcatttctctagtctcctacaatctgacaattccttagtctttctgtgtctttcatgactttgatgccttaatttttttttttaatttttaaacacttaaaaaatagagacaggatcttgccctgtcactctatttggagtggagtggtgcaatcatagctcattgtagcattgaactgctgggcttaagtgatcctcctgccttagcctcctgaatagctatgactataggagtgtgctgccgtgcctggctaatttttttcttattttttgtggagatgggatattgcagtgttacctaggctggtctcagaatgctgggctcaagtgatcctcccaccttgccctaccaaagtgctgggattacaggtgtgagccactgtgcctggcctgatgctttctaagagtacttgtttagatattttgtgtccctagatttgtctgatgattaggctgcagttatggatttttgggaagaataccgcagaggtgatgtgcccttctcatggtgtcctatcaggagctacctgatgtcagtatgtcctgttactggcaaagttaaccttaatcatttggttaaggtagcctctgccaggtttctccaccaagttactatttttccttttctgtactctgttaaggcaaattattgctttttaaattttgatgtacctcaatatgcatgggagatacatagctttgcagctccctcaatcttaattgtaataataatagtaataacaataactagcacttgctccgcctgcatagttctaaacacatgtgcccatttaatcctcatgacaccctgtgaagcaggcactttatgctcattttatagccgagaagactgaggtacagagtaccttgcccaaggcctaataactagtaagtgatggagccagatctttttttttttttttttttttttttgagacggagtcttgttctctcttgcccaggctagagtacagtgacatgatctcggctcactgcagcctccacatcccgggttcaagcaattctcctgtctcagccccccgagtagctgggactacaggcatgcaccaccacgcctggcttatttttgtattttcagtagagacagggtttgaccatgttggccaggctggtctcaaacacctgacctcaggtgatccacctacctctgcctcccagagtgctgggattacaggcatgagccactgcacccagcctggagccagctcttcacttcgcctgagttgaagggctgactttaacatgggccatatggttgtcgtcagagcttaggatggggacgctctcattctttgccagagaaaacaaatgcttcctatatttaatgcttctctcttgttttttctttaagacatttttttggtttgtttttccttccaggaatatatcttgtgtgactaaagattttagtaagctatatgtggcaatcataccatattaaaatcttggggagaaatccaagaaacttttggaaacattaaggatctatttttggtcttcttttcagaaataagactgaaggtagggcagaatattcagcatagaaaagtgctgtggtagaagaaatactcagtgagtgacactgcgcctttttctcctgggatgttatcagccacttctaccaggggtgtctctgtttgtctgtatgtgtctaaccctgccatgttcgcctttcttgaccacactaatgacttttctatgacacagtcaaatgtatctctgaatagcctgacttggggtaataactgtggtttacgtgatgacttggtctctgtgagccccctattctagtagcagtggagccactgaaggtcaggcagtgtgggtggacatttgtccatcttcctgtgactcactcagccgcctgcctttctgaggggaaagagctgcaggtgcaaagctctaatacatcccttcccttctctgtctaattctattatgtatattgcatatcccccaaatccttgaaattactcagctacgtgtcttattatatctagtctgccaagctgtctaggtatcagtacagtttttttctatgtctatatttattttccgaaaatgaaatcctactgtatttctttgtagcttcttttctcatttgacaatatagctgaagaagtttccatgtcatatggcatttatctacaatgttgtttgggtacctgcctattatcaatagcttggctatattatgattggtggggaatgtggcttgtttccctctatccctcttcagcatccaggacaggatgttcttgcagtcaccgaatgttaggaagctcagagtgctctcaggcatcatctgattaatcttttcttttgcacatagcatagttgaggataagtcagtgcaatttttaaaaataaagctttttttttttttaatgtctattgtatgtctggctggaagtgccagggtccacagcttaaacaagacactgcttatcttccaaagccttcccagagaggcatatacacacaaactgtaggatttatttccttaggaaggcaactgtttagaataagtctgatgctagcctacaatatatagaacactttacaaatgtagaaaattacttggggaattgataatagaggtcaggtttacaggtgtctggatctggcctcagaagtcagagggctaaggattagtctttttctcagatatggttttctacatattgattatagacaaaatataaagtagaagaaaatgtaaggaagaaagtgaaagtggcccatttctactgccagaaatagccactgttttattttggtataatttttcctttcctccctccgttctccttcctcttccatactgcaaatatgttcataatcctgcatttttcatgtaacactgtatcaaggatttttaaatgttacttacagaaaaggactttgctactttgataaggaaaaatatctagttttaatttgtattcccttaatattttagggaggattaacgttcgtttatgttgactgtctattcatgtttatccataattctacctttctataaaattggacatgttactaaagcaagcctctgatttcagatgtcctaaacgatgctatatttgatgaagatcatgatgagatggtgattgtgaaggacatagacatgttttccatgtgtgagcatcacttggttccatttgttggaaaggtaaggttctctttgttgtttcccagcaatttaaaacatagtgaaagtttttcaattagaataattatatttaaaatttttagctgccaattgctgatatctcaggtatttacaattatacatatatggttattctttattaacctgactaataacttgaaacttaaaaaacaaaaccaaagtagcagaaggctctcaggataagcctttcatgttaaataccaggttcataggttaaaataatgaggtttaagtagcatctctctctctctttttttttttttgtagctactacaggctctgaaaacctttaacctttatttatttattattagcatcccaatctagagatgccctttattttaacttgaataatgtttgatccaagatagatatgtatgtatggcatgtcatgagcaacaataattgcagaatttcttgtgacagaggttatggtatttgtggatttgtttccattcctttctatattaggaaaagtgaatctaatgcattagattcctcagcacctctgtgaatttcttttgtcagaaatgtttagtcctagtcttatgaaactttagatctaatctagtttacaggaaatccagaggctgaatggaacaaatccagaaggtggggcactctgctgaacagctggcctattctcttttcaatagagaatattatgggtgggagcactattttaggacaaaagggacttaagaggtataaccaaatgcagtgtaaatacaaatgtgtgactctccattggattcctgtttaaacaaaccaaaagtaaaacatttgagacaattggaggaatttaaatctgagttagttattagatgttgtctaggaatgactacttaacatacctttgagaacatgtggtatagaacaaagagttgtcccatttccctacccccatcataattttatttaattttgactctttattaataatctttaaacagaagacttacaagaagcagtgttatgaatacttatatacccatcaactaaagttaaagtgttaacatttgcttcatttttgtctttgttaaagtattgtatcttttcacttttttatggaaataatatatagatagaaaatgcataaaacttaagggtgttccttaccacttcagagatcaagaactagaataggctggcacggtggttcatgcctgtaatcccagcactttggaaggctgaggtaggtggattgcttgaacccaggagttcaagaccagcctgggcaacatggtgagaccccatctctaccaagataaaaataaaaattacctgggcatggtggtgcatgcctgtactgccagctactcgggaggctgagatgggaggatggcttgagtccaagaggcaggggttgcagtgagccgagattgcgccactatatcctagcctgggcaacagagccagactgccagaccctgtcaaacaaacaaacaaacaaacaacaacgaaacccccacaactacaatatgtgtagcatcctggaagctcacctcatttcttttctcttcttaatccctaatccatcctttgtatcagtttatcaacttataaccctatggattcgttttcttgtttttcaactatatgtaagtggaaagattctacgatatgtactctttgtgtctggcctctcttgttctacatagtcggattcattgatgtcattgcctgtcattgtagtttattttcattgttatatcttattccattgtacaaatataccacaatttatctattctgctcttggtggacctttgtattgttgcctcttttttttttttttttttttttgctattacaaacaatactgctgtcaatacttttttggagtacatgtgcatgcttttttttttttttttttttttttttgagacggagtctcgctctgtcgcccaggctagattgcagtggtgtgatctcggctcactgcaagctccacctcccgggttcacgccattctctcacctcagcctcctgagtagctgggactacaggcgcctgccaccatgctggctaattttgttgttgtatttttagtagagaaggggtttcacggtgttagccaggatggtcttgatctcctgacctcgtgatccgcccgccttggcctcccaaagtgctgggattacaggcgtgagccaccgcacctggccctaaaatattttcttacttatccacagcagcactatcacaaaattaacaataattcttaaatagtgtctaataacgaattcatatttaaatttctccaattgtctcaaatgtttactcttggtttgtttaaacaggaatccaagggagagtcacacatttgtatttacattgcatttggttatacctgttaagtcccttttgttctaaaatagtgctcccacccataacattctctactgaaaagaaaataggccagctgttcagcagagtgccccaccttccagatttgtttccttcagcctctggatttcctataaactagattagatctaaagtttcataagactagggctaaacatttctgataaaagtagttcgtaagggctgggcacggtggcttacgtcagtaatctcaacactttgggaggccaaggcaggtggtggatgtatcgctttgagctcaggagtttgagaccaacctaggcaacatggtaaaaccctgtctctaccaaaaaaaaaaaaaccaaccaaaaaaaaaaaaaacgaaaaccaatcaaccaaacagacaaacaaaaaaacaggcaaaaattagctagcatggtggcatgcacctgtggtctcagctactcgggagggtgaggttggagaatcgcttgaacccaggaggtcgaggctgcagtgagccgagatcacaccactgcactccagcctggcaagagagtgaatccgtgtccaaaaaaaaaaaaaaaaaaaaaaagagtagtgcttcataagggtgctgaagacttcatattatatcacatcagggccgagtgaggtggctcatgcctgtaatcccagcgacttgggaagtcaaggtgggaggatagcttcaggtcaatagttcaagaccagcaagtgagactgtctctaccacaaaataaatttttttttaaaattaattgggcatggtgggtgcatacctgtagtcctagctactttttgggagtctgaggcaggaagattgcttgagctcaggagtttcaggttacagtgaactatgatcatgccactgtaccccaacctgggtgacagaacaagaccttgtctctaaaaagaaaagaagagaaagcaatcagaaaacccagatacatcacatcagaagccatatcgtatctggaaatcctgcaattgataatgaaggaatctttgaaagggaatctattggtgagcaaattaggcacagaaagcctgtgacttgttcaagaggatagagagagttagtggcttggctgcagccagatccaaggcactgattctgtactcagcctgtcaccattttatcctgttactttctgctattacttcctcagtgtttgtgtttttgctacctttgttttaaaaatatattatttagtgattttttttttttttttgagacagtttcgctcttgttgcctaggctggagtgcagtggtgcgatctcggctcactgcaacctccgcctcccaggttcaagcaattcttctgcttcagcctctcgaatagctgggattacaggcacccgccaccacgcctggctaatttttgtatttttagtagagatggggtctcaccatgttggccaggctggtcttgaactcctgacctcaggcaatccacccaaaatgttggaattacaggtgtgagccaccactcctggcctatctagtgattttgtgaaatggacatttaaattacctaggatcttaagaccaaaaatagtataaacaatgaacaaattccgtgtctgcatggaaatgtaaaaatttcagacagcatagaagaccttggttcatgggaaagttttaactctctaatttttctttgaaatcctcaatgttcaggtgctattttactttttcctcctgccaaccaggaaggcaatgaggtggacttctcaaattcctaaagcatagtgccaatggatgggggaaaaaatcactaagtactactagatcaattatgtaaatagtaagtgaacaatgaaaacagtgttagcaaaccatgatgccgttgagtctctaattttatattcggttaattaattgcctacaagtgaccatttactctattaatcttttcagagaactaatgtttttcgtatgtagtatttggccccaaaagagtaacttttatatttgatattaattggtgccatttaagataacagaaatggcctggctgtatattgggtcctttaaaacttagttcttagggtgcaggttcttgccaagccatggtggtagcagtgccctttttctccagttaggaagatggggccgggcgtggtggctcacgcctgtaatcccaactctttgggaggccgaggcgggcagatcacaaggtcaggagatcgaaaccatcctggctaacacggtgaaacaccatctctactaaaaatacaaaaattagctgggtgtggtggcaggcgcctgtagtcccggctactcaggaggctaaggcaggggaattgcttgaaccttggaggcggagcttgcagtgagccaagactgggccactgtactccagcctgggcgacagagtgagactccatctcaaaaaaaaaaaaaaaaaaaaggaagatggtgcactctctagcagcttagaaaccaggaagccaagcacaaaagggtgtggagaccttctgtgctgcagggctttgcggtgggatcttaaggctgtgaggtgggatcttaaggctgctgtgatgtgtggaatggcaatacttatgcttacagtttttgccatttaaaggaggctttcctgtatacattttagtgttgctatgagatcatttgcctttccttgagaatgtttctcctccataaagaagaaactttcagatttgtgtcaagagttcaacttcacaggtaagtgtcagggccatgcaattgactcttgaacaacatgaatttgaactgcatgggtccacttagacatggctctttttcaagcaaacactgatcaaaaattctacagtatttgcaggatacaaaacctgtatagatggaggggcaacttttcatatatgcaggttctgcagggccgactgcgggacttgagtatgcaggatttgggtatacacaggggtcctggaagcaatctcccgcatttaccaacggacaactgtacaagtttgttatttgattaatagactcatacttatatattttgcttttactgcatttatgtaattttaaaaatacatatataaatgtttcattttctaagtcttaacagttccagatgttttcaaggtaatacattgtcgtgataaattacataaaagtgtactatattctttctatatttccttattttgtcacaaagaaggcactgtattttcactcagctaatgatttccgtctcttctctgaaggtccatattggttatcttcctaacaagcaagtccttggcctcagcaaacttgcgaggtaagtgtgactgtgcagtgaacaagaatacaggtttataggacctgccctcatctgctgagaatctatctcatcaggctttctctctttacctgtatggatctaacttggaagtcatattgcaacttaaagacttggagggtctgaaacacagatgccccttccttctcgtcccctactgcctgcttcctcttccacttcccaccctttcttccatagatacatacatcctggaagtctcagcccacctctttctctgcagagccttctctgactggagaggtcctgagcttaccttcagtccagccccatcctttaaggggggtttagctaacagtgaggggttggggaagaagctgggcaggggtctagctgcagtgctctgctgtcgaacttgttgtcaggcctgaggactcttctatccttgtcaaggggagtgctcaccttctttgctttcatacaacactgctttcagacttgtaatgaaacttccctgtgggatccccagcctcaaccctgccttgctctgcactggatgcctccaggcatatctcaggggtcctgcaggccagtccgttcatgtctaggttctttgtttctgcaaacacaagactgcctgccttggctttgcacagctttattctgatacagtgttcacgctcctcgctctcatttctctttcctgctacaatcttcttttctgttgtttatcctgtgggttcatgccttaaaaaattcccttactgccttttttatttgggttttaggagaggtgatgtacatacacgttcatctgtgtttaactggaagtcaacatgggggtttgtgttcagatatctctggtaggccccagccaccaatattttattgcccttaaatatccttgttgtttcttcgtataaagttagtgaattttgagtgatggaggaaatactgggaggtgtgtgtgtgtgtggagagagagagaaagttaagaacaagatgaaggggtcgggtaaagtgttcctactctttttttttttcaaaaataatcaagctaagtttgaataacttgaggttatagtgaccatatcataattgaaataaatgagtctcggccgggtgccgtctttcacacttgtaatcccagcactttgggaggctgaggcgggcggatcacttgaggtcaggagtttgagaccagcctcaccaacatggtgaaaccccatctctactaaaaatacaaagattagctgggcgtggtggcgcacacctgtaatcccagctaatcaggaggctgaggcaggagaattacttgaacccgggaggcagagcttgcagtgagccgagattgtgccattgcactccagcctgggcgatggagtaagaccctatctcaaaaaaataaaaataaaagaagaggaataaatgagtctctgtgaccagttgactgtgctgtggctctgatgtgttcctgtttctttatgcaggccctgggatttaacacagttgtgaaatggtggtcctgatatttctcaattctgtgttggaatctgtaaaaaaaaaactactccagcaatctgacaactgccctctaaagttgttcctgttactttgttttcacttccactttctcattcatttcctctggggatcaataagaaagtgggtagaagagacaaatttaacttccccagtttctgacctcattcctgctcagctattttgctattagatagggctgcttggcaccatgaaagaatattatatcatagctgtaattgcttcactggaataaggctcttagcacaaatccagaaacattctggctgcttgcgtgtgatccatccctggtggcagtgctgaaaagttgctgagaaaaagtgtgttggtagtgattgggagtaattaatcttactataatttttattaacgactcccttcccagtaacttaccctcaactaatgatgtattaaaccaatttcatgtcaactgtgagtaaaagtatctttactaaaattggttattcttatggttttataatatacagtctaagtaaaatcagcatgcttactgtgcaaacatagctgtaggcccagtcccctgggcctccctgtcagcaagattgctaaccctataccttgcccatatagaaattccagcactgctgatgcctataacagactgtccatatgtgaaaggtgtaatggatagtttcatagtgtaaaaaagcttggcagatcacattaggccttggtcttaatgtaacagccttctctgaaaaaccaactgttgatcatgattaacactttatgggaaatggactcttgagtgattcagtgagatcatacaataaatggcaacctggtggtagaaggaaataatcttagttatttcctttccaagtgaaaggaaaagatctcaaataattaagcttttatgaaacaatacaaaggagttgattattagcatggggatttgtccttagactaataggattaaaatttaagaataaaatggaacatgaagccaaagaaccaagtgtatgttgctttcaaatattttgcaaaaaatttgaataaagagtctattaaatagaaaagaagactaagattttatccaactacttattccttataagaagtaagaatatttagagaatgaagaggaataaaagctgaatgtcttagcaaaacttcactgctcattttaatcttatatatgaagtttgttatatgcttgcctttaaatgaatgacctttcagtgccagtgaagtcaaatatcaagcagtaaagccttaagtaacaagaaaatgccagaagtgagttgatctggctcaactctagtagaattctagaataaacttagtttgaatagaactttcttttgttgctgaaaagccattgaacatgtattcattttcttcccttagaaataactgagcctcggctgggtgaggtggctcatgcctgtaatctcagcactttgggaggccgaggtgggcagatcacttgaggtcaggagttccagaccagcctggccaacatggtgaaaccccatctctactaaaaataccaaaattagcagggcatggtagcatgcgcctgtaatcccagctacttcggaggctgagatggaagaatcgcttgaacctgggaggcggaggttgcagtgagccgagatttcaccactgcactccagtctcgtgacagagcaagactctgtgtcactaaaaataaataaataaataaataattgagtgaatgtacgaaatcttgaatttagagttgtagtatctcaggtagccatggctgacctgttgggtgggcactgtgccagctactgtggaggctaaagaagcaggacatggcagccaccctcaaggagagtgcacagggcaagactgcaagtgccatggaaatgcctgctgtagctccaagttcagaggagccatgatggctgtggcctggcaggtgaatagacctggaggtggagggatgagcagaattctaaatgggggagaagtttctctaggtatagttaatgcatgagcaaagaccagtcagagggtaggagcaaggcctattccagtggatgggaaccagattgactgatggaagtaagagtaagtgaggtgagtattagattacagagggagcagtatttttttttcttttttgactataaaagcaacataccatttaaatacaaatgagtgaataaagtgaaaacttttcttacctattttcattccccagagttagaactagagatttctttcactatccttctggaaaatatttatgcaagcacaaacataagatcatatcttatattctgtactacaacttgctttttaaaattttattttatttggtgtttttttgagatggagtcttgctttgtcggccaggctggagtgcagtggtgcgattttggctcactgcaacctctgcctcctgggttcaagtgattctcctgcctcagcctccccagtagctgggattactgatgtgcaccaccatgcctggctaatttttgtattttcagtaaagacagggtttctccatgttggccaagctggcctcgaactcctggcctcaagtgatcagcctgccttggcctcccaaatgctgggattacaggcatgagtcactgcacccggccagcttttttttttttttttttttttttgagacagggtctttctctgtcgcccaggctggagtgcagtggcactatctgggctcactgcagcctccacctcctgggttcaagcgattctcctgcctcagcctcctgagtagctgggattacaggcgtgtaccaccacgcatagctaatttttgtatttttagtagagatggggtttcaacatgttggcaagactggtcttgaactcctaacctcaggtgatctgctcaccccagcctcccaaagtgctgggattacgggagtgagccaccgcgcctggccctggccagctttttaaaaatttaaaataccttgaagttctttggacatcttttagtccaaaaagtccaagtttcttttcatagctacctaatatttctttgattaatacaattcatttaaccagtatttgctatagataagtacagtttgcagtttgagacttgccaaaaagtaaaaaagtaccctggtgaacaaattttattatctttgtgtgctttgaatctatctgaagtttaaattactagtatggaacttgatgggtaaagggtagccgaatttttgatattatgaaattgctctccaaagagaccatgccagtttatactctaataaatagatacataggtaaggggtggtgtatgtttctccacacttcggccaacacacttttcatcacacttttaaatctttgccaaactgataagtaaaaaatagtatctattttaatttgcatttccttaatagagcgaggttgaatctattcagacacttcctgttcttagctccagtattaatttttccactgagttatttgtctttttattcttggtttgcacaagctctgaatgttaaagcagtcaggtcaggtgctacagacaatgcttcccagctcgtcatttgtcttttgattttgctttatagtattatatttccataaagaagtttaaaacttttctgtagttcacaaacttcttttttttttggtacttgtatggccacattattatatttaaatctttgctccatctggagtgtattttggggtgaggagtgaggcagaacccatccactgctgcgtgtgctcactgcccggcaggtgcagcacccccacttcctgccttcctgccctccctgctgcaggtctttgctgggcctttcttatcttcctcctggagggaatgttaagctcctgcctcctccctgcctctcatctctgaggatccttcagtttgccctcatgagctgctgggatgttctttctaaagtgtggattggatcatgctgctcctttggtggctcaccacagcttttcagttaaagtccaaactccttatttagaataatttagaaaaagccaaagaacagaaatcacaaatctacaagttgaaaatcttgtatcataggttgctggggagtctgatatctaggaatgagacgatatgtaactaaaaatatgctttataaatctttacatcttgatgaatacgttttttaaaaagatggggagagaaaggaatggaccaagagtttgaaagcctgcatacattaataaccattagaaaaggtcaaattaatgatttgggggaaagtgcctggacccagtcagttttataagtgttctttcaagctttcaagtaaccacaaattttgcatgtgtataaataattcaagagcgtagagaaacctgtgaagtgtcaattaatttgatgaagctgcctattcttgataacaaagcctgataagcctagcattaaaaaaaaaaaatgataggcaaatctcactgattaatgtagttgtaagaatcttaaaatgtcaggctagtatagaagtactgttttcaacatgacccagggatgtttagtccaagaatgtaagaatggtttagattaaaactgacaactactgatgctgggtgtggtgaactagattaataatgcccctcttggcacagcgtatcaagatataatgcatatgtacattttacactttcgggaaagcatgaggcaattctagtgagaatccactggaattagcactaaagccacagtctggattctgtcctcccttttcccatcccaaatcaaggacgatacttacctattagcattattctaggaagagcaggaaaaagaaaaaggaactcatagacacattcataaagtttgggatcagaattagtactacctgtgtggccttcaaaaaatcaaatggaataatttagtttcaaacgaccccataaggccaggcatggtggatcatgcctataatctcagcactttgggaggccaaggcaggtgggtcacctgaggtcagcagtttgagaccagcctgaccagcatggtgaaaccccatctctactaaaaatacaaaaattagctgggcatggtggcacacgcctgtagtcccagctactcaggaggctgaggcaggagaattgcttgaacccgggaggtagaggttgcagtgagctgagatcgcaccattgcactccagcctgggcaagagcaaaaactctgtctcaaaaataaataaataaaaataaataaaacatccccatagaggtatccttgcaggcagctagcagaaactagtgcatgttctctgatgcacttttatccaggcttggaaggatacccaaagatgaagttccaaggagtaccatgagtcgagtcagacaaacacgatggaagagggcagatagtagaactatcagagataggatataaaacaagtacagtaagtcctcactttacgttgtcgatgggttcttggagactgcaacttgaagcgaaatgacttcaggcaaagtggcatataacagtcctggaataatgttgtttcattcaatgtcatttcagtatgattgagaaaaaaaaattccttgctgggacccactgtctgtgtggagtttgcatgttttctcccacatctgtgagtttcctccaggtgcttctgtttcctcccacatcccaaagatgcacacgttaggtgatttggcgtatctgatctgagtggtcccagtctgagtgagagtaggtggatgtgtgtgccctgtgatgggatagtgtcctgtccagggtcagttcctgccttgtaccctgaactgctgggaaaagctccagccacttgagaccttgaactggaataattggggaaatcaatatctttccattaatctttcttaaatgtatgtatcactcacatttattttagtgtttaatattagaagtgtttttgtgtttatttggaagtttgttgacgtttttgtgaccagaaatatgctatgggagcttaattcttattatatcaattagcctagggtaaaatttgttttgttctcagtgttttagtaaagtcatagattccgagaacctgtcgaccttgagcaaggacttactatatattaaaaaataggctgggtgcagtggctcacgcctgtaatctcagcactttgggaggccaaggcgggcagatcacctgaggtcagtagttcgagaccagcctggccaacatggtgaaacaccatctctactaaaaatacaaaaattactattgtgagtagtgctgcaataaacatatgtgtgcatgtgtctttatagcagcatgatttataatcctttggttatatacccagtaatgggatggctgggtcaaatggtatttctagttctagatccctgaggaatcgccacaccgtcttccacaatggttgaactagtttacagtcccaccaacagtgtaaaagtgttcctatttctccacatcctctccagcacctgttgtttcctgactttttaatgattgccattctaactggtgtgagatggtatctcattgtggttttgatttgcatttctctgatggccagtgatgaggagcattttttcgtgtgtctgttggctgcataaatgtcttcttttgagaagtgtctgttcatatccttcacccactttttgatggggttgtttgatattttcttgtaaatttgttaaagttctttgtagattctggatattagccctttgtcagatgggtagatcataaaaattttctcccattctgtaggttgcctgttcactgtgatggtagtttcttttgctgtgcagaagctctttagtttaattagatcccatttgtcaattttggcttttgttgccattgcttttggtgttttagtcatgaagtccttgcccatgcctatgtcctgaatggtattgtctaggttttcttctagggtttttatggttttaggtctaacatttaagtgtttaatccatctggaattaatttttgtataaggtgtaaggaagggatccagtttcagctttctacatatggctaggcagttttcccagcaccatttatgttttccccatttcttgtttttgtcatgtttgtcaaagatcagatggctgtagatgtgtggtattatttctgagggctctgttctgttccattggtctatatctctgttttggtaccagcaccatgctgttttggttactgtagccttgtagtatagtttgaagtcaggtagcgtgatgcctccagcacatgcacacgtatgtttattgtggcactattcacaatagcaaagacttggaaccaacccaaatgtccatcagtgatagactggattaagaaaatgtggcacttatacaccatggaatactatgcagccataacaaaagatgagttcatgtcctttgtagggacatggatgaagctggaaaccatcattctgagcaaactatcgcaaggacagaaaaccaaaccctgcatgttctcactcataggtgacaattgaacaatgagaacacttggacacagggtaggaaacacacaccggggcctgtcgtggggagcagggagggatagcattaggagatatacctaatgtaaatgatgagttaacgagtgcagcacaccaacgtggcacttacatacatatgtaacaaacctgcacgttgtgcacatgtaccctagaacttaaagtataataataattaaaaaaaaaaacaaattagctggatgtggtggcgggtgccgctaatcccagctacttgggaggctgaggcaggagaaatgcttgaacctgggaggcagaggttgcagtgagctgagattgtgccattgcactccagcctgggtgacaagagggagactctgtctcgggggaaaaaaaaaaaaaaaaaaagaacctacttatatataaaaaaattgacaaaggagatcgggcgtggtggctcacacctttaatcccagcactttgggaggccaaggcaggcggatcatgaggtcaggagttcaagaccggcctggccaacatggtgaaaccctgtctctactaaaaatacaaaaattagctgggtgtggtggcaggcacctgtaatcgcagctacttgggaacctgaggtagagaattgcttgaatgcgggaggtggaggttccaatgagctaagattgtgctgctgcactccagcctgggcaacagagcaagactccgtgccaaaaaacaaacaaaaaaaaattgacaaagggataagaaacttgcagaattagccaggcagattgggaagaggaggaaatataacttttagaaattaaaaaaatgaaactgaagtccagtatactcattaaatagattagacatagattaaatacggtgattgggaagaaaggtctaaagaaattgtgctgaatgcagcgcaaagacaggtagaaaatatgaatgagaatttaagaaacatggaagactgggagggtataatatgcccttaattgaaattcctggagataacagaggcaatgtgctagatgcaacgttagagaagataatggctaaaaaagtttctagaacacatgcaaaatatcggtcttcagaaagcctaataaattccaaataagtcaaattaaatccctacttggattaaaacatagtaaattgcagtatatacttataaaatatagttaatataaaagcagccaaagaaagaaatatcgattatctaaaaggcaacagcagttacactgaattggtttgccaacagcaatactgaagggcaagatagatatcagtgtcaaactagaattcggttcccagcaaatacctctcaacaaattatctttccagaatgacagcaaaataaagatttttttttttaatctagggaagctacatgacatgctgaaaagatgtgttaggtttcatatttactcctcacttgtaaaagaaaactaataaactagggtttagaaataataagctctcagagcacagagagcatgttcaccatataatcacatacatagcaggcactcagtaaaaatctatgggaatgttcctcctgccatgagagcagctgtctgccagaagcaggcaggcactgtgggtggtagtgaaatcctagaggcattcctattgaagtgtggagcaaaacatggttgcccagtgttaccactattgtccaatgtggcacctgaagttctactccagaaaaagaatggtgaatacgagaaggaaaacattactaactttaaaatcaatggcatctcctacatatataacaaactaatcacctgaaaaactatcagaagtaatatatacagaaatttgacctagtaagaaatatgacatacctcctatctaggagcttaaaaaccattcctttctaaggttttgttcaaaataccaatagaatatagctattaatatatttcttcaatatcctagtaactactgctgggataaaggagagctaggatggcttctgccctcagggagctctgggctgagtggtaaacggggtggcggacctgttactgactttgttggctgtaatgggtataaaggagcaagttgttggttctgagacgtgtagttgggggaagagccaggaaatgcctcatagggaggtgaaccataaattgaatctgaattcatgatcaaaaggccatgaatttaaagaaaaggtcctcagtgtgaatagtcatcttcaaatggataagtcacgtggtcatctttatatttcataaatagaatgaaagatgttgaaaggggaaaattctggctgggcacaggggctcacgcctgtaatcctagcattttgggagactgtggtgggcagatcacgaggtcagaagttcgagaccagcctggccaacatggtgaaaccctgtctctactaaaaatacaaaaattagccgagcatggtgacgggtgcctatagtcccagctactcaggaagctgaggcaggagaatcgcttgaacccaggaggcagaggttgcagtgagctgagatcatgccattgcactccagcctggatggcaagaacaagactccatctcaaaaaaaaaaaaaaaaagaggaaaatttatcacttgacagattgtgctataagttaagatcaggaggcttttatttcttgggggttaatcttactaagtgcttacataaacctatcttatgaagaggtgtctgaagaagtctaatcagttccaatctgattctcctaataggtttagttggtatagtagttgaccgtggtgtgctattaattaacaaagtctttttatttttaacttgaattttaagctctgataaaacaatatgattaatcagagcacttgagacatgatctaaaattgatgatttggaactttaaaattttgttactcatctctgtttttcctaagtgaacgtcacagttggagactcattaattctctttctggggacatcaggaagcaccactctgcagtggttggtggtcttctgtattagtaagggttccctagagggacagaactaataggagatatatatatatatataaaggggagtttattaagtattgacttacatgatcgcagggtcccacaataggctgtctgcaagcttgaggagcaaggagagccagtctgagtctcaaaactgaagaacttggagttcgatgtttgagggcaggaagcagccagcattggagaaagatgtaggctgggagtcaaggccactcttgccttttcatatatttctgcctgctttgtattcgctggcagctgatgagattgtgcccacccagattaagtgtgggtctgcctttcccagcccactgactcaaatgttaatctcctttggcaacaccctcacaggcatacccaggaacaatactttgcatccttcaatccaatcaagttgactttagactacatctccctgtggtacttgtatctttctgtcatcttgccataagctttatttcctcttgcagcccacttgcttcaacaatgtcctttttgttttatgaggaaggcttatcaattttacttcaaatgatttgtgattaactaaaacaattctttcttttctaggattgtagaaatctatagtagaagactacaaggtaagctttaaaaatctgtattaacagaaaacatttttcttttttttctttttttaaatttttatttttgagacagagtcttgctctgtcacccaggctggagtgcagtggtgcaatctcggctcactgcagcctcagccttccaagtagctgagattataagagtgcatcaccatgccttggctaatttttgtatttctagtagagacggggtttcaccatattgatcaggctggtctcgaacttccgacctcaggtgatctgcccaccttggcctcccaaagtgctgggattacaggcatgagccactgtgcctggctacagaaaacatttttcctacacaaaaagtattttttgttttattactagtgcgataagtatgacttataaaaatgtaaaacctcttaggactataaaaagtctactgtttcaagcttccagaagaaatcactgttgtatttgcacattccttcacattttcatgcatatacctgcattttcaaatcaatttatttggattatgtttaaacaaaaatgggctcattttatacataatcagccttgcttttttccctgctttttttcatttaacaaatcttaaacatttttgccacatccatgtaactatctcattcattctggtggctgtctagaatcctaccgtatatgccatggcttggcgtaacctataccagctctgatagatactggggggtttcatcagttttcaaatagatgcagtgctgcaatgaatattcctgtatgaattaaaagacaagtcattttattcaggacaggaactatattatttaggttaaattgttggttttcaacattgctctaagcacaattcaataattggactgcagcccctttgttaaccctgttgcaggctatttatttgctgcactactttacctccatggaggtgcttggtaaccagtactgtgttgttctaactgcacaggtatgagataattgctattctaattccttcccgcagtgatgctggagggcttcagggtgttctgagatctctttagccctgtacttcaggtgagggagttgaatccgggcctctctgtggcccagtcagcagacaaagcagtctggtaaaagctggtgtgtcttggctcttaaatctcacagaagtctgatttttaagatttcaaatgttctagagacagaaaaagcttccagctgtttgtgtcagactctcaaactgagctccttatcacatccacagttcaggagcgccttacaaaacaaattgctgtagcaatcacggaagccttgcggcctgctggagtcggggtagtggttgaagcaacgtaagtctgcatctgcctttagtaacgtcataatggtgcactagaagtgatcttgctatttagtgcttctcatattttgtagcaccaggtgatgccacacaactgatatgataactgtagatttccatccctgagcctaaagctcttttaccactttcatttactgttactgatataggaacagaatatgggagaagtattttttgagggtaggatggggcttgtggaggcatagggagttaaaagcacaggtgtagagatttgcataatcaatagccttttttttttttgagatggagcctcactctgtcgcccaggctggagtgcagtggtgcaatctcggctcactgcaacctccacctcccgggttcaagcgattctcctgcctcagcctcccgagtagctgggaccacaggtgtgtgtcaccatgcccggctaatttttgtatatttaatagagatggggtttcatcatgtcggccaggctggtctcgaactcctgacctcatgatccacccgtcacggcctcccaaagtgctaggattacaggcgtgagcccctgcgcccagctcaatcgccattttttaaaaatgctcaagacagggtcttgctctctcacccaggctggagtgcaatggtgtgatcttggctcactgcaacctctgcctcccaggttcaagcgattctcctgcctcagcctcccaaatagctgggattacaggtgcccgccaccacacccagctaattttcgtatttagtagagatgggatttcaccatgttggccaggctggggatctcaaactcctgacctcaagtgatctgcccacctcagcctcccaaaatactgagattactggcgtgagccaccacgccaatagccatttttatgtcttctcttgattttatgtcttctcttgatttcttctttagctctctgttgctccaagccgagtttttctaatattttgtcacacatttaaaaaataaagccaagaattggtacatttctttaagttaggatgagttaagagaattgcagctgttgtgtggacaaagttcatatgtgttctgtgacgtggtgtgaactctgttctatgtctggtatctaatgtcaccaggttgctcagacaggatctctggtcaccattatctgaattctgcctggtgacatcagtatacttgagcatttatctgaacacctaggctagcatagtgctgtcttggtcctgaaggcagagcaagtgagaattctgactttcttttgatctagaagttaagtaactctgtagaccttttatattactttcaccccagaagaaaattccatttttcccctttttggatgctttaaggatcaactactgataaaaataaaagttgcaagacaacttcaagaacaaaaagtttaggttgctgcaaagataattgcagtttttgccattatgttcaatagcaagaaccgcagttacttttgcatgaacctaatagataacatttgtgtaagaagggatatttcgatatacttggtaactgtgagctgagatttaatctttaggcctgcttttaaaaaccaaaccagcagctgtctactcctttaaacaacctgtgttgccttattttgtagacacatgtgtatggtaatgcgaggtgtacagaaaatgaacagcaaaactgtgaccagcacaatgttgggtgtgttccgggaggatccaaagactcgggaagagttcctgactctcattaggagctgagcttcattcagtgtgtgtgcgttggttgccgatcgtactgccagtagcattgtctgtctgtccggtcttgtttgtacattccattttcaattgttacagatgtgaactttattccttgtcactaattatatttaaaattatttctaggaagtcaaataaatataataaagggttgagccctctactttcttcttgccacctttttgtggcaatattaaagtgaactgctaatagtgtaagtacgtgcacaaaaccactgccagataaccagaggggcctgggaagggagaagaattagtgtatttttttcaaatagtacagtaatttgcctcataagcataggagcattgggaatgagagggaactgtgcccagtatactgttttttttcttcctccaataaaagtggtgtagtgccgaaagtgctaaaatatttagtgcggtattgctctgtgaattcaagttcaacagacttcactttggtcatgtttattaaaccaccagtgacatttaaaaatatatttttagcagtcgtaatgttagtcaccaagggaaggtggtggaatgtctatgtttttgattttactgtgagttaaaaaggcacatttctaccttctattgtttttaaattcaagaatagggaattagttcctggtgttgtttacgagtgtattctcgtgtcaacatacagggatttagacatttaactctctgtgccttgataagaatatcatttagagtgtagatacttttgcctttttaaaaaagccattattttatgagacttagtactcacactgcaaataactagtcagctcagttttaactttataggtttattgagtttcctttgtgtgatccatgtagatgcctcaaaatgtttcttcttcttcttttttttaatcttataagatatttttctaagtatttccagaaacatttgagagtgcccatcattttcaggtctgcagaaccatagcttccacgcacctgaacgagcacagaatgaactgacggtggaagacattatgagctgtgtccaacgttttaaccaaagcgtatcgtaccaacgatctgtgaaaatgcactggaagcttctggtcccggtttcctttgtggtctatgtgggtcttgtcctcattgtaactccgtatagatggtataggtattttaatcctggaagctgttgccttattaatgattatcttaaaatttcctccattggggcagcgtgggccaaattaaaacaaacaaaaccgcaactcctccacagaaacacaaacacagttattccatgaagtttagtatttggttgacatagtgctcttcaaattcatcccattaccctaaaagtaataactttgatgcttgctttaactttagtcccatctctgccactttgatgctatttgggttatgatggggcaagatggcagaggtattgggtttttttgtttttttccattcctctctacttctgtttcctagctttttctttctggagtttaagtacagtgatggttggcttgagtacctttttaaatctagcccagtataaacattagcctgcttaatatttagacatttataggtagaattctgagcactcaactcatgtttggcattttaaagtaaaaacaagtgtgacttcgaggaccaaagaaattgtcagctatacatttatctttatgaactcatttatattcctttttaatgactcgttgttctaacatttcctagaagtgttcttataaaggtctaatgtatccacaggctgttgtcttattagtaaatgcaaagtaatgactttgtctgttttactctagtctttagtacttcaaaattaccttttcatatccatgatcttgagtccatttgggggatttttaagaatttgatgtatttcaatacactgttcaaaattaaattgtttaattttatgtatgagtatgtatgttcctgaaggtggtcctatttaaattattaaactattgtaactttgttcttgtgaaagttgtttctttttcaaccaccactataaatatttaaataacttgattattttggctgtattctgtttcagcaaagacatcataagggcttctcccagccatcaaagctatttgaatactaatctccattatagtacgaagtaaccccaggttctgacagtttctccttggtatttggttggagtcttaccgtcctcactgtcttgaggtaatgggaggaggaggtctgggataagagtcaggaatctgagtggccctcatgtccctgttgtcttaatgcttagtaggtaacttcagccccctgggaactggcactgtttcctacgtgggagctgttggggaaggaagagtaggctggggcagggagtggaaaagggtttccttccctcttctaggaagagcctgcccagggcaaaacttccagttagtgcaaggggttttgtgctgctcttctgtcccatgcccaacaacctcctttccctcttgctaatggtctcctccccattccgtgctgcccacaggcagaggccgcccctgccctcactggtggccagcatgtccaagtactggggcctgctgctccttgtgggaccctgtggaccgttgggtagcaaatcttatcaaagtaggaatgcttactggcataaaacattcctagaaccaccactcataggtgtcaataaaacgatgagctgctcagctaagcccgagttgctgcttctgagttttgtcaccgaagattgattggccaagttccttttcacttagtggaagagcagttgcagacatgaaaggttttcaagaagcctttctgtcaaaacagagcacctggattcatcatcacaggcatgggtcctcctgctgatggagagaagaagaagtctcaagagatcaaggggaagtgtgagtacctgactcctcaccctcccagaggcccttgccttcttttaatttttgttacagaaaatgaaacatgcacatcagtagagagatgagcacatgaacccctgtgtactaatcacccagcttcaagaagtctcaactcaatggcgccatcttgttttcctctatacccatctgaccagattattgcaaagcaaatcccaggcattatttcatccataaatatttcagattatctaaataaagtggaatcaggtaaagaaatatatgatcaaatacatccattatcacactaaaaattagtgtcaattcaaatatctagattttcccctactgttgtgtagtttttagtagtttatttgaatcaaggtacaaacgagatccacacattgcaacaggttgatttaagtctcttaagaatcttatatgttctctttccactccctcctctgttttccttaaaatttatctggtcacttgttttggagaagccccgtgtttattccaggaactgtctggttgctggaatgtctgtggctgtccaaatgaggtcaaactccagctaaacagggaaaagaagggttctttgccacaacacttctccacgtccctaaacccctactcctgggcagcctagcttggtctggttctgtctggcttttaactggaacatagctctccttggctttgtaacttagagccattccccaggtacagaatagaattcattgcttttttctgagtgtgtcctttttgggcaaggcttccattttaaaacatgctgcctttggcttcagcttggtggattccttggctgccaagattttggttaaggtggaaaggttattacagaagtgaaaacaatgaatctcacagtaattggcatcactttgagggcctacccatggggaattccattgggttggacagtaggagtacttgggtttcttccccccggctcctcgacctcatcaattacattttcatgacatcctgagtatgaatatcaggctctggccgacaaagggtggtgaaggaagacacactgcgtcttgcatttaagcagctccctttattccctccctagcagtgcagctatgacttgcttgtgggtcctggtaggataactcctggcacctgcattacacagccctaatgcacctatccacttttcctcttatttctacattctcctgtttgttttgagcaatatgtccacaactctgaccttttgagaaatcctttcaatctggaactgactgtgctgcccagagaaatgtggtttggctgccggtgagcattgggaaggttgtgtggagggagtcctgtgatgaaatgcctgggtgtgtgtatgtacaacttcctctcaggctattgattttccctgattttagaatgcattttttattcttcctccttttcctggatcctttcacattcaaaaatgtactgaacaaataaatgagatttctttttttctaatttgtttttttgtggagtttcccattatatgtgtagtgataatttttacagtcattctatctagactgacaaaattctttatggaaacttttctctttgcaaggacattttacttctaaaaccaagggggataaaccgaattaaaaaaaaaagctagtaaataaaaatcagcttaaaaccattctggttctatcagggacctcagaattattggtccgtattggtcatctggtcattggtctcctagcagctgctcaaccagttttggctggaggtgggttttggtctctgtctctctttggcttcactgctgccagcctcaactgcgttcctgattgcttgggaagaacggcctttgacgtctgtatctggacagatgacagtctcttgtgggcccacacagtggcttccgctcctctcaatttgggaaattttaaaggaatttccatttgcagattgaacaagtctaaccagagagaggaagcaacctgactgtttcagtttgtacctttgaactttcaagtacctttaaccaattagagacaactaatctttcttttgctctctctttttttttttttggagacagagtctcgctctgtcgcccaggctggagtacggtggcatgatcttggctcactgcaaccttcacctcctggttcaagcaattctcctgcctcagcctcccgagtagtggattaaagatgccctccaccacgcccagctaatttttgtatttttagtagagacagggtttcaccctgttggtcaggctggtctcgaactcctgacctcaagtgatccacccgccttggcctcccaaagtgctaagactacactcagctcaaagtgctgagccactgtgcccggcccaagacaactaatctcagagcaaaatttcttgcctgaagtctcatttctgaaagttgatttgcatgtgatcaaggagtatttgaagtcttatccaaatcttagctgaccttctcttgcttaacagttgtcagaatcacctcttaatgaaggggttggtggagtcagcacttgactctaacagaatttccatataaatttaatatatttaaaaaataattatgaataaaaagtatcacgtgcacttgaagtatagacaagccaacaatgaattctcattgtctttttaactagaacacacacaaaacaggacattaaaatcaacatgaaaccctgagctctgagaactcataatttgtttcctgcattttagtgtttgggggatggaaaacaaatcttccagattttctgtgtgtgtgtgtatgtatgtgtgtgtgtgtacccaacaccgaatctggaagacttgttataaggaagaatatatattttttctttctttctttttttttttttttttttttttttttttttgaggcagtatcttgctctgttgttgctcagcctggagtgcagtggcatgaacacagctcactgcaacctctacctccctggctcaagcgatcctcctgcctcagccccccaagtagctgggactatagacacatgctacagtgcccagctaattgagtatttccattttataagtgagttgggtgtcagggagggtcaaatgatgtgcgtcacccacactgggttaaagaggtgatgttgctccctggactctgcttctgttgacctttctgttaaccagtgggcccagccccttaggttacctctggctcccattgtagctggttaatcttttccaggtgccctctgtcactctgtgcccccacatatttgaagatgtatactatcacctttgccctttgaactcaaaggtgctgctgggagtgattataggagtgtgagatggtcaccttgtagttccatgtaatcacactgtcttaaatgctcaaattaaaaaaaataaataaaaactggtaattctgtggttagcacaaaattcaaacatcacaaaataattaaggaaacatttaccttcacctctgctcccaagtaagccaggcagctgctatcatcagagatatttaatgaaattctttactttcatggcagaatgaaaatctttgtctcctgcatgtaggctgactttatgtacttcctaatggtagaaggtgtaactctaaactggtgaggagtttgtgtaactatcagaatgtaaaatccattatgtttattctggtgttctttcaaagtcattagatgctttctctgaattttttttttttttagcaaaatcatctgcaaaagaaaaatgtgtcctccttacagaactttgaccaccttagcaaaagaaaagcagattctggcaaactgagtgtttcaagcaggggctcttttaaaatttgtttttttctttcacttttcacgttatttgaataggtaatatatgcacttgcatataatgtgaaaagcacaaaaggatatgccttgaaaagtctctctccctttccatccccagctgcccagttcttttccccaaagccaccactttaccacttttttgtttgtttgttttgagacacagtttttgctcttgttgctcaggctggagtgcaatggcgtgatcttggctcaccacaacctctgcctcccaggttcaagcggttctcccgcctcagcctcccaagtagctgggattacaggcatgcgccaccacacccggctaactttgtattttcagtagagactgggttttaccatgttggccaggctggtctcgaacttccaacctcaggtgatccgcctgcctcggcctcccaaagtgctgggattacaggcgtgagccactgcgcctggcccactttaccactttcttacatatacttccccaaatatttaaggcatatttacacacacacacacacacacacacacacacacacgcacacacgtttatttaaatgagggactattggccatgtgtgcctatccaaatcacctagggaacttttagacaatgtttctgtaccctgtgaggaactattcagtatttgtaattatagtttgaaaaagaaaattgcccttggttattctggtgggctccctcagttaagaatgactagcctaagatacaaaaattcagacccacagaacccaacaggaagccagtagctccttcccaggcaatttgggcaggagaacagctgtgtggatcactctgtgaacaatcgtttctatcgtccctggttaagggcatctgcaaccactcagctgataagtctaaaggtaaattgtcccttaaaagggactgtctccagattaatataatcactgctgcaattgcctgtgtataaataacttatttctctggtctgatacctctaaacatatcctacttttttcctcctccatctcatttttttatacttgttaatcatagaaaacttagaaaatgggcaggcacagtgggttacacttgcaatcccagcactttgggaggctgaggtgggcagatcacctgaggtcagatcacgtgaggtcaggagtcaccagcctggccaacatggtgaaaccccatctctattaaaaatacaaaaattatctgggcgtggtggcaggcacctgtagtcccacctactcaggaggccgaggcaggagaatcgcttgaacccgggaggtggagtttgcagtgagccaaaattgtgccactgaactctagcctgggctacagagaaagactctatctcgaaaaaaaaaaggaaaaaaccttagaaaacagtgaagtataaataaaaagaccagttacccaattgcatagttcagaaaataactgctgttgacatttgttttattttacttgcttttaaaattgtgcaaataatatctggatgcttctggaatatttaaagcaaatccatccagacagtctatcatttcatcggtatttatttcactatgtatcactaatggataaggggtaaggacttaaataaaatccccgcacattatcacatcccccccaaagttacaaccattacttgatatcatatcatattctgcatttaccttttcccagattgccttacatttcttcctagagttcactttgatgtgttttcttccatttgtccctccttattctgtgtaactatgtgtaatactttggatactctaaagtcctcacagtcattccctcccttatcttgtatctttgtttaaatggctacatgatgttccatggtataaatgtcacatgtattgattattttcataatgatgggctgtcatgttgtttccagttttttcttattataaataacactgcagtggacatctctatttccaaaggataggcttttaggtatagatttattgggacaaaaaagtcacccgtctttctgtcttcccctccctaagtaacaaaggacagactcaggtgggctatttacaacccccaccctggccctgtgctgtgcaactgtcctcatattgtaactgtcttacacctaaaattttgtagcacacaaattaattttttctctcacccaggggtaactttgcacctcacttatcttggcagattcacagttttacacggaaacttttattgagataactgtatgaagaaatactacagttagaagaaatactacacagagttcacttctgtactttgctgggtttttcccagtgcgaacatttagccaaacgatggtgcaatatcacagccaggatattgacattgatataatacaccaatctcattctgatttgtccagttttgcttgtactcacttgcatgtgtgattaatttctttgcaacgtacaggtctatgtatcccccaccatagtcaagatgctgacagttccaataccacaggatctatcgcgttgccttactataaccacaccactcaccctcagccccttcacattttaaaaagactcttttttttttttgagatggagtctccctctgtcacccaggctggagtgcagtggcgcgatctcagcttactgcaacctccacctcccaaggccaagcaatttttgtgcctcagcctcccggagtagctgggattacatgcatgcaccaccacagctggctaatttttgtatttttagtagagatggggtttcaccatgttggccaggctggtctcaaactcctggcctcaagtgatctgcctgcctccggcctcccaaagtgctgggattacaagcatgagccactgcacccagccaaaaagactctcaatacatattccaaatttctgtctagcaagatataactaattcatactaccctgccagcattgagtatcatttaaaaaatatattactaggtggccaatgttttcactgtctagctttctgttaaagtcttttaatacatgtattgtcaaatttggcctcaaagtgtattgcaaatattctcctagaagaaatgaggcagatgtttctttcatttctctgcttgtccaatacttcaaaacattgttttcagtgaaaatcaaatcatgaaccctgccaaatgcaagaagcatgcagccttctatctttaacaaagctggtactaactttcaggaacactacttgtggggttgagacaattgtattttgcttaatagggttttctggctaagagcagactggaaggttttgctaaagttatttctaaaagggattttatctaagtcaaaggatacttaccttttctaagtacagttcaatgaaaaataattttattttctttaggtagaggtgatctctgagagaaggagccctctcaatatctctctctgagaaatgagtatattccttctgcttggcagtggtccgggtaacccacgacaccctggcatttaggctggctccctttgtggggtcagaattcttcctggtctaaagtgaagtcactgtggacctgcttttcattataagccatcatttttgctaaaggtagagcattactaaagttggagttgaggcgattataaacagcagtatggaggatgaacctggaatacagcggatagaaacagtgtgggggtagagtggtagacgacaggtagaattagaaggctctgtcctcaggcaaacatagcatgggaggtacttcagtcagaaatacagtttataataaatcaattctcatttagcctggaaaagttaacacacatgatacatggaggacgcaattgaattttagccatgtagttgtgcacattttagatctagaagtcacagagagtataaacacagaagatcagattataaaagaccctgtatatatatatttgctatttaaaacaacaataaatgcctatatcatttgccccagtaattctttggggaatttatcctctagatgtatttatatatatatgtgtgtgtgtgaaggtgacatttgtatacaagattattcattgcagcattgtttgtcataagaaagctcttgtttattagctctaaacccaaagtatgcaaaatgatcacatgaagttttggttgcaatttttagggtcctggaagtcctagctagagcaatcaagcaagagaaagaaaagacaggcaagtaggaaaagaagaagtcaatttatctcttcactgacaatattactctatacctagaaaaccataaagactccactaaaaggctcctggaactgataaacgacttcagtaaagtttcaggatacaaaatcagtgaaaacaaattggtagcatttctgtacaccaataatgttcaagctgagagccaaatcaagaatgcaattgtatttacaacagccacaaaaaataaaatacctaggaatacatctaactaaggagatgaaagacctctataaggagagctgcaaaacactgatgaaacaaatcatagatgacacaaacaagtggaaaaacatcccatgcccatggttcagaagaatcaatattgttaaaatggccatactgcccaaagcaatctatggagtcaacactattcttatcaagctaccaatgccatttttcacagaactagaaaaaactatgccaaaatttctatggaaccaaaaaagagtccaaatagccaaagcaatcctaagcaaaaagaacaagaccagaggcattacttgacttcaaactatgttataagattacagtagctaaaactgtatggtatggtacaaaaacagacacatagccaggcacggtggctcctgcctgtaatcccagcactttgggaggttgaggtggggagatcacatgattccagcctgggcaacatggtgaaacccgtcactatgaaaaatacaaaaaagtagctggctgtggtggtgcacgcctgtgatcccagctactcaggaggctgaggtgggagaatcacctgagactgtgaagtcaagcctgcagtgagctgtgatcacaccactgcactccagcctaggcaatgggagtgagaccctctctcaaaaaaacaaaatgaaacaaacaaacaaacaaaaaacaagcacatagaccaatgaaaccgaatagagaacccggaaataaagctgcacacctacagccatctgatctttaacaaagtcaaccaaaataagcaacgaggaacagaatctctgtacaataaattgtgctgggatagctgtatagccataaatagaatgaaactcgacccctatcttttaccacatataaaaattagctccactggtcgggcgccgtggctcacgcctgtaatcccagcactttgggaggctgaggcgggcagataacctgaggtcgggagttcgagaccagcctgaccaacagggagaaaccccgtctctactgaaaatacaaaattagctgggcgtggtggtgtatgcctgtaatcccagctacttgggagtctgaggcaggagaattgcttgaacctgggaggcagacgttgcagtgagcagagatcacgccattgcactccagcctgggcaacaagagcaaaactccatctcaaaaaaaaaaaaaaaaaaattagctcaagatgtattaacgatttagatgtaagacctcaaactataagaatcctagaagaaaacctaggaaaccccattctggacatcagccttggaaaagaatttatgactaaattctcaaaagcaattgcaacaaaaacaaaaatggacaagtaggagctaattaaagagcttctgcacagcaaaaaaaaaaaaaaaaaaaaaaaaaaaactatcaacagagtaaactaacaacctacaggatggaagaaaatatttgcaaactgcactaagcaaagctctaatatccagattttataaggaacttcaacaattgaacaagcaaaaaacaaataacccaattaaaaatgcgtgaaggacatgaacagacactgctcaaaagatgacatacaagcagccaacaacatatgaaaaaacactccacatcactaatcaacagaaaaatacaaatcaaaaccacaatgaaatatcatctaacaccagtcagaatggctattattaaaaagtcaaaaaacaacagatgctggctaggctgtgtagaaaaggaacgcttatactctgctggtgggaatgtaaattagttcagccactgtggaaagcagtttggagatttctcaaagaacttaaaacagaactaattcaatccagctatcccattactggcatatatccaaaagaaaataaatcattctaccaaaaagacacatgcactcatatgatcaccacagtactattcatgatagcaaagacatggaatcaacctagatgcccatcactggtggattagataaagaaaacgtggcacatatacaccgtggaatactacacagccataaaaaagaatgaaatcatgtcctttgaaacaacatgagtgcagctggaggccattctcttaagaaattaacacaggaacagaaaaccaaatactctgcgttctcacttataagtgggagctaaacattggatactcgggatataaagatggcaacaatagatactggggacaactaaggggggcaaaggttgaaaaactaatgatgggtactatgctcagtgcctgggtgacaggatcaatcataccccaaacctcagcatcacataatatacccatgtaacaaacctgcatgtgtacaccctgaatctaaaatagaagttgaaattataaaaataaacaaactaataaataaataaatttgtagagtctttccaccaagagtacattggattcattttttttttttttagagatggggtcttgctatgttgaccaggctggtcttgaactcctgagctcaagtaatcctcccacctcagcctcccaagtagctgggaccacaggcatgcaccactgcacccaacttaggtagatcagattctgatccactgtccacttttatctcttgggctcatgctgatcaaagttctgaggttaggcaggagcagttggttggttctggctgagaatccttcaaagcattagttagcatcacatctagggatacatgtggactgggagtcacagcgttcattactctcttacttttagagactggagaatggacatttgggggaatttgttcttgataaagtgttgtgtaagccaacgaaatgagggatgcagaactgcctgcctcacccttttctttttactctttcccttaggagtggaagcaaaaat

SEQ ID NO: 38 - DNA, 84819 bp, Homo sapiens
atttttgcttccactcctaagggaaagagtaaaaagaaaagggtgaggcaggcagttctgcatccctcatttcgttggcttacacaacactttatcaagaacaaattcccccaaatgtccattctccagtctctaaaagtaagagagtaatgaacgctgtgactcccagtccacatgtatccctagatgtgatgctaactaatgctttgaaggattctcagccagaaccaaccaactgctcctgcctaacctcagaactttgatcagcatgagcccaagagataaaagtggacagtggatcagaatctgatctacctaagttgggtgcagtggtgcatgcctgtggtcccagctacttgggaggctgaggtgggaggattacttgagctcaggagttcaagaccagcctggtcaacatagcaagaccccatctctaaaaaaaaaaaaaatgaatccaatgtactcttggtggaaagactctacaaatttatttatttattagtttgtttatttttataatttcaacttctattttagattcagggtgtacacatgcaggtttgttacatgggtatattatgtgatgctgaggtttggggtatgattgatcctgtcacccaggcactgagcatagtacccatcattagtttttcaacctttgccccccttagttgtccccagtatctattgttgccatctttatatcccgagtatccaatgtttagctcccacttataagtgagaacgcagagtatttggttttctgttcctgtgttaatttcttaagagaatggcctccagctgcactcatgttgtttcaaaggacatgatttcattcttttttatggctgtgtagtattccacggtgtatatgtgccacgttttctttatctaatccaccagtgatgggcatctaggttgattccatgtctttgctatcatgaatagtactgtggtgatcatatgagtgcatgtgtctttttggtagaatgatttattttcttttggatatatgccagtaatgggatagctggattgaattagttctgttttaagttctttgagaaatctccaaactgctttccacagtggctgaactaatttacattcccaccagcagagtataagcgttccttttctacacagcctagccagcatctgttgttttttgactttttaataatagccattctgactggtgttagatgatatttcattgtggttttgatttgtatttttctgttgattagtgatgtggagtgttttttcatatgttgttggctgcttgtatgtcatcttttgagcagtgtctgttcatgtccttcacgcatttttaattgggttatttgttttttgcttgttcaattgttgaagttccttataaaatctggatattagagctttgcttagtgcagtttgcaaatattttcttccatcctgtaggttgttagtttactctgttgatagttttttttttttttttttttttttttttgctgtgcagaagctctttaattagctcctacttgtccatttttgtttttgttgcaattgcttttgagaatttagtcataaattcttttccaaggctgatgtccagaatggggtttcctaggttttcttctaggattcttatagtttgaggtcttacatctaaatcgttaatacatcttgagctaatttttttttttttttttttgagatggagttttgctcttgttgcccaggctggagtgcaatggcgtgatctctgctcactgcaacgtctgcctcccaggttcaagcaattctcctgcctcagactcccaagtagctgggattacaggcatacaccaccacgcccagctaattttgtattttcagtagagacggggtttctccctgttggtcaggctggtctcgaactcccgacctcaggttatctgcccgcctcagcctcccaaagtgctgggattacaggcgtgagccacggcgcccgaccagtggagctaatttttatatgtggtaaaagataggggtcgagtttcattctatttatggctatacagctatcccagcacaatttattgtacagagattctgttcctcgttgcttattttggttgactttgttaaagatcagatggctgtaggtgtgcagctttatttccgggttctctattcggtttcattggtctatgtgcttgttttttgtttgtttgtttgtttcattttgtttttttgagagagggtctcactcccattgcctaggctggagtgcagtggtgtgatcacagctcactgcaggcttgacttcacagtctcaggtgattctcccacctcagcctcctgagtagctgggatcacaggcgtgcaccaccacagccagctacttttttgtatttttcatagtgacgggtttcaccatgttgcccaggctggaatcatgtgatctccccacctcaacctcccaaagtgctgggattacaggcaggagccaccgtgcctggctatgtgtctgtttttgtaccataccatacagttttagctactgtaatcttataacatagtttgaagtcaagtaatgcctctggtcttgttctttttgcttaggattgctttggctatttggactcttttttggttccatagaaattttggcatagttttttctagttctgtgaaaaatggcattggtagcttgataagaatagtgttgactccatagattgctttgggcagtatggccattttaacaatattgattcttctgaaccatgggcatgggatgtttttccacttgtttgtgtcatctatgatttgtttcatcagtgttttgcagctctccttatagaggtctttcatctccttagttagatgtattcctaggtattttattttttgtggctgttgtaaatacaattgcattcttgatttggctctcagcttgaacattattggtgtacagaaatgctaccaatttgttttcactgattttgtatcctgaaactttactgaagtcgtttatcagttccaggagccttttagtggagtctttatggttttctaggtatagagtaatattgtcagtgaagagataaattgacttcttcttttcctacttgcctgtcttttctttctcttgcttgattgctctagctaggacttccaggaccctaaaaattgcaaccaaaacttcatgtgatcattttgcatactttgggtttagagctaataaacaagagctttcttatgacaaacaatgctgcaatgaataatcttgtatacaaatgtcaccttcacacacacacatatatatataaatacatctagaggataaattccccaaagaattactggggcaaatgatataggcatttattgttgttttaaatagcaaatatatatatacagggtcttttataatctgatcttctgtgtttatactctctgtgacttctagatctaaaatgtgcacaactacatggctaaaattcaattgcgtcctccatgtatcatgtgtgttaacttttccaggctaaatgagaattgatttattataaactgtatttctgactgaagtacctcccatgctatgtttgcctgaggacagagccttctaattctacctgtcgtctaccactctacccccacactgtttctatccgctgtattccaggttcatcctccatactgctgtttataatcgcctcaactccaactttagtaatgctctacctttagcaaaaatgatggcttataatgaaaagcaggtccacagtgacttcactttagaccaggaagaattctgaccccacaaagggagccagcctaaatgccagggtgtcgtgggttacccggaccactgccaagcagaaggaatatactcatttctcagagagagatattgagagggctccttctctcagagatcacctctacctaaagaaaataaaattatttttcattgaactgtacttagaaaaggtaagtatcctttgacttagataaaatcccttttagaaataactttagcaaaaccttccagtctgctcttagccagaaaaccctattaagcaaaatacaattgtctcaaccccacaagtagtgttcctgaaagttagtaccagctttgttaaagatagaaggctgcatgcttcttgcatttggcagggttcatgatttgattttcactgaaaacaatgttttgaagtattggacaagcagagaaatgaaagaaacatctgcctcatttcttctaggagaatatttgcaatacactttgaggccaaatttgacaatacatgtattaaaagactttaacagaaagctagacagtgaaaacattggccacctagtaatatattttttaaatgatactcaatgctggcagggtagtatgaattagttatatcttgctagacagaaatttggaatatgtattgagagtctttttggctgggtgcagtggctcatgcttgtaatcccagcactttgggaggccggaggcaggcagatcacttgaggccaggagtttgagaccagcctggccaacatggtgaaaccccatctctactaaaaatacaaaaattagccagctgtggtggtgcatgcatgtaatcccagctactccgggaggctgaggcacaaaaattgcttggccttgggaggtggaggttgcagtaagctgagatcgcgccactgcactccagcctgggtgacagagggagactccatctcaaaaaaaaaaaagagtctttttaaaatgtgaaggggctgagggtgagtggtgtggttatagtaaggcaacgcgatagatcctgtggtattggaactgtcagcatcttgactatggtgggggatacatagacctgtacgttgcaaagaaattaatcacacatgcaagtgagtacaagcaaaactggacaaatcagaatgagattggtgtattatatcaatgtcaatatcctggctgtgatattgcaccatcgtttggctaaatgttcgcactgggaaaaacccagcaaagtacagaagtgaactctgtgtagtatttcttctaactgtagtatttcttcatacagttatctcaataaaagtttccgtgtaaaactgtgaatctgccaagataagtgaggtgcaaagttacccctgggtgagagaaaaaattaatttgtgtgctacaaaattttaggtgtaagacagttacaatatgaggacagttgcacagcacagggccagggtgggggttgtaaatagcccacctgagtctgtcctttgttacttagggaggggaagacagaaagacgggtgacttttttgtcccaataaatctatacctaaaagcctatcctttggaaatagagatgtccactgcagtgttatttataataagaaaaaactggaaacaacatgacagcccatcattatgaaaataatcaatacatgtgacatttataccatggaacatcatgtagccatttaaacaaagatacaagataagggagggaatgactgtgaggactttagagtatccaaagtattacacatagttacacagaataaggagggacaaatggaagaaaacacatcaaagtgaactctaggaagaaatgtaaggcaatctgggaaaaggtaaatgcagaatatgatatgatatcaagtaatggttgtaactttgggggggatgtgataatgtgcggggattttatttaagtccttaccccttatccattagtgatacatagtgaaataaataccgatgaaatgatagactgtctggatggatttgctttaaatattccagaagcatccagatattatttgcacaattttaaaagcaagtaaaataaaacaaatgtcaacagcagttattttctgaactatgcaattgggtaactggtctttttatttatacttcactgttttctaaggttttttccttttttttttcgagatagagtctttctctgtagcccaggctagagttcagtggcacaattttggctcactgcaaactccacctcccgggttcaagcgattctcctgcctcggcctcctgagtaggtgggactacaggtgcctgccaccacgcccagataatttttgtatttttaatagagatggggtttcaccatgttggccaggctggtgactcctgacctcacgtgatctgacctcaggtgatctgcccacctcagcctcccaaagtgctgggattgcaagtgtaacccactgtgcctgcccattttctaagttttctatgattaacaagtataaaaaaatgagatggaggaggaaaaaagtaggatatgtttagaggtatcagaccagagaaataagttatttatacacaggcaattgcagcagtgattatattaatctggagacagtcccttttaagggacaatttacctttagacttatcagctgagtggttgcagatgcccttaaccagggacgatagaaacgattgttcacagagtgatccacacagctgttctcctgcccaaattgcctgggaaggagctactggcttcctgttgggttctgtgggtctgaatttttgtatcttaggctagtcattcttaactgagggagcccaccagaataaccaagggcaattttctttttcaaactataattacaaatactgaatagttcctcacagggtacagaaacattgtctaaaagttccctaggtgatttggataggcacacatggccaatagtccctcatttaaataaacgtgtgtgcgtgtgtgtgtgtgtgtgtgtgtgtgtgtgtgtgtaaatatgccttaaatatttggggaagtatatgtaagaaagtggtaaagtgggccaggcgcagtggctcacgcctgtaatcccagcactttgggaggccgaggcaggcggatcacctgaggttggaagttcgagaccagcctggccaacatggtaaaacccagtctctactgaaaatacaaagttagccgggtgtggtggcgcatgcctgtaatcccagctacttgggaggctgaggcgggagaaccgcttgaacctgggaggcagaggttgtggtgagccaagatcacgccattgcactccagcctgagcaacaagagcaaaaactgtgtctcaaaacaaacaaacaaaaaagtggtaaagtggtggctttggggaaaagaactgggcagctggggatggaaagggagagagacttttcaaggcatatccttttgtgcttttcacattatatgcaagtgcatatattacctattcaaataacgtgaaaagtgaaagaaaaaaacaaattttaaaagagcccctgcttgaaacactcagtttgccagaatctgcttttcttttgctaaggtggtcaaagttctgtaaggaggacacatttttcttttgcagatgattttgctaaaaaaaaaaaaaattcagagaaagcatctaatgactttgaaagaacaccagaataaacataatggattttacattctgatagttacacaaactcctcaccagtttagagttacaccttctaccattaggaagtacataaagtcagcctacatgcaggagacaaagattttcattctgccatgaaagtaaagaatttcattaaatatctctgatgatagcagctgcctggcttacttgggagcagaggtgaaggtaaatgtttccttaattattttgtgatgtttgaattttgtgctaaccacagaattaccagtttttatttattttttttaatttgagcatttaagacagtgtgattacatggaactacaaggtgaccatctcacactcctataatcactcccagcagcacctttgagttcaaagggcaaaggtgatagtatacatcttcaaatatgtgggggcacagagtgacagagggcacctggaaaagattaaccagctacaatgggagccagaggtaacctaaggggctgggcccactggttaacagaaaggtcaacagaagcagagtccagggagcaacatcacctctttaacccagtgtgggtgacgcacatcatttgaccctccctgacacccaactcacttataaaatggaaatactcaattagctgggcactgtagcatgtgtctatagtcccagctacttggggggctgaggcaggaggatcgcttgagccagggaggtagaggttgcagtgagctgtgttcatgccactgcactccaggctgagcaacaacagagcaagatactgcctcaaaaaaaaaaaaaaaaaaaaaaaaaaaaaaagaaagaaagaaaaaatatatattcttccttataacaagtcttccagattcggtgttgggtacacacacacacatacatacacacacacacagaaaatctggaagatttgttttccatcccccaaacactaaaatgcaggaaacaaattatgagttctcagagctcagggtttcatgttgattttaatgtcctgttttgtgtgtgttctagttaaaaagacaatgagaattcattgttggcttgtctatacttcaagtgcacgtgatactttttattcataattattttttaaatatattaaatttatatggaaattctgttagagtcaagtgctgactccaccaaccccttcattaagaggtgattctgacaactgttaagcaagagaaggtcagctaagatttggataagacttcaaatactccttgatcacatgcaaatcaactttcagaaatgagacttcaggcaagaaattttgctctgagattagttgtcttgggccgggcacagtggctcagcactttgagctgagtgtagtcttagcactttgggaggccaaggcgggtggatcacttgaggtcaggagttcgagaccagcctgaccaacagggtgaaaccctgtctctactaaaaatacaaaaattagctgggcgtggtggagggcatctttaatccactactcgggaggctgaggcaggagaattgcttgaaccaggaggtgaaggttgcagtgagccaagatcatgccaccgtactccagcctgggcgacagagcgagactctgtctccaaaaaaaaaaaaagagagagcaaaagaaagattagttgtctctaattggttaaaggtacttgaaagttcaaaggtacaaactgaaacagtcaggttgcttcctctctctggttagacttgttcaatctgcaaatggaaattcctttaaaatttcccaaattgagaggagcggaagccactgtgtgggcccacaagagactgtcatctgtccagatacagacgtcaaaggccgttcttcccaagcaatcaggaacgcagttgaggctggcagcagtgaagccaaagagagacagagaccaaaacccacctccagccaaaactggttgagcagctgctaggagaccaatgaccagatgaccaatacggaccaataattctgaggtccctgatagaaccagaatggttttaagctgatttttatttactagcttttttttttaattcggtttatcccccttggttttagaagtaaaatgtccttgcaaagagaaaagtttccataaagaattttgtcagtctagatagaatgactgtaaaaattatcactacacatataatgggaaactccacaaaaaaacaaattagaaaaaaagaaatctcatttatttgttcagtacatttttgaatgtgaaaggatccaggaaaaggaggaagaataaaaaatgcattctaaaatcagggaaaatcaatagcctgagaggaagttgtacatacacacacccaggcatttcatcacaggactccctccacacaaccttcccaatgctcaccggcagccaaaccacatttctctgggcagcacagtcagttccagattgaaaggatttctcaaaaggtcagagttgtggacatattgctcaaaacaaacaggagaatgtagaaataagaggaaaagtggataggtgcattagggctgtgtaatgcaggtgccaggagttatcctaccaggacccacaagcaagtcatagctgcactgctagggagggaataaagggagctgcttaaatgcaagacgcagtgtgtcttccttcaccaccctttgtcggccagagcctgatattcatactcaggatgtcatgaaaatgtaattgatgaggtcgaggagccggggggaagaaacccaagtactcctactgtccaacccaatggaattccccatgggtaggccctcaaagtgatgccaattactgtgagattcattgttttcacttctgtaataacctttccaccttaaccaaaatcttggcagccaaggaatccaccaagctgaagccaaaggcagcatgttttaaaatggaagccttgcccaaaaaggacacactcagaaaaaagcaatgaattctattctgtacctggggaatggctctaagttacaaagccaaggagagctatgttccagttaaaagccagacagaaccagaccaagctaggctgcccaggagtaggggtttagggacgtggagaagtgttgtggcaaagaacccttcttttccctgtttagctggagtttgacctcatttggacagccacagacattccagcaaccagacagttcctggaataaacacggggcttctccaaaacaagtgaccagataaattttaaggaaaacagaggagggagtggaaagagaacatataagattcttaagagacttaaatcaacctgttgcaatgtgtggatctcgtttgtaccttgattcaaataaactactaaaaactacacaacagtaggggaaaatctagatatttgaattgacactaatttttagtgtgataatggatgtatttgatcatatatttctttacctgattccactttatttagataatctgaaatatttatggatgaaataatgcctgggatttgctttgcaataatctggtcagatgggtatagaggaaaacaagatggcgccattgagttgagacttcttgaagctgggtgattagtacacaggggttcatgtgctcatctctctactgatgtgcatgtttcattttctgtaacaaaaattaaaagaaggcaagggcctctgggagggtgaggagtcaggtactcacacttccccttgatctcttgagacttcttcttctctccatcagcaggaggacccatgcctgtgatgatgaatccaggtgctctgttttgacagaaaggcttcttgaaaacctttcatgtctgcaactgctcttccactaagtgaaaaggaacttggccaatcaatcttcggtgacaaaactcagaagcagcaactcgggcttagctgagcagctcatcgttttattgacacctatgagtggtggttctaggaatgttttatgccagtaagcattcctactttgataagatttgctacccaacggtccacagggtcccacaaggagcagcaggccccagtacttggacatgctggccaccagtgagggcaggggcggcctctgcctgtgggcagcacggaatggggaggagaccattagcaagagggaaaggaggttgttgggcatgggacagaagagcagcacaaaaccccttgcactaactggaagttttgccctgggcaggctcttcctagaagagggaaggaaacccttttccactccctgccccagcctactcttccttccccaacagctcccacgtaggaaacagtgccagttcccagggggctgaagttacctactaagcattaagacaacagggacatgagggccactcagattcctgactcttatcccagacctcctcctcccattacctcaagacagtgaggacggtaagactccaaccaaataccaaggagaaactgtcagaacctggggttacttcgtactataatggagattagtattcaaatagctttgatggctgggagaagcccttatgatgtctttgctgaaacagaatacagccaaaataatcaagttatttaaatatttatagtggtggttgaaaaagaaacaactttcacaagaacaaagttacaatagtttaataatttaaataggaccaccttcaggaacatacatactcatacataaaattaaacaatttaattttgaacagtgtattgaaatacatcaaattcttaaaaatcccccaaatggactcaagatcatggatatgaaaaggtaattttgaagtactaaagactagagtaaaacagacaaagtcattactttgcatttactaataagacaacagcctgtggatacattagacctttataagaacacttctaggaaatgttagaacaacgagtcattaaaaaggaatataaatgagttcataaagataaatgtatagctgacaatttctttggtcctcgaagtcacacttgtttttactttaaaatgccaaacatgagttgagtgctcagaattctacctataaatgtctaaatattaagcaggctaatgtttatactgggctagatttaaaaaggtactcaagccaaccatcactgtacttaaactccagaaagaaaaagctaggaaacagaagtagagaggaatggaaaaaaacaaaaaaacccaatacctctgccatcttgccccatcataacccaaatagcatcaaagtggcagagatgggactaaagttaaagcaagcatcaaagttattacttttagggtaatgggatgaatttgaagagcactatgtcaaccaaatactaaacttcatggaataactgtgtttgtgtttctgtggaggagttgcggttttgtttgttttaatttggcccacgctgccccaatggaggaaattttaagataatcattaataaggcaacagcttccaggattaaaatacctataccatctatacggagttacaatgaggacaagacccacatagaccacaaaggaaaccgggaccagaagcttccagtgcattttcacagatcgttggtacgatacgctttggttaaaacgttggacacagctcataatgtcttccaccgtcagttcattctgtgctcgttcaggtgcgtggaagctatggttctgcagacctgaaaatgatgggcactctcaaatgtttctggaaatacttagaaaaatatcttataagattaaaaaaaagaagaagaagaaacattttgaggcatctacatggatcacacaaaggaaactcaataaacctataaagttaaaactgagctgactagttatttgcagtgtgagtactaagtctcataaaataatggcttttttaaaaaggcaaaagtatctacactctaaatgatattcttatcaaggcacagagagttaaatgtctaaatccctgtatgttgacacgagaatacactcgtaaacaacaccaggaactaattccctattcttgaatttaaaaacaatagaaggtagaaatgtgcctttttaactcacagtaaaatcaaaaacatagacattccaccaccttcccttggtgactaacattacgactgctaaaaatatatttttaaatgtcactggtggtttaataaacatgaccaaagtgaagtctgttgaacttgaattcacagagcaataccgcactaaatattttagcactttcggcactacaccacttttattggaggaagaaaaaaaacagtatactgggcacagttccctctcattcccaatgctcctatgcttatgaggcaaattactgtactatttgaaaaaaatacactaattcttctcccttcccaggcccctctggttatctggcagtggttttgtgcacgtacttacactattagcagttcactttaatattgccacaaaaaggtggcaagaagaaagtagagggctcaaccctttattatatttatttgacttcctagaaataattttaaatataattagtgacaaggaataaagttcacatctgtaacaattgaaaatggaatgtacaaacaagaccggacagacagacaatgctactggcagtacgatcggcaaccaacgcacacacactgaatgaagctcagctcctaatgagagtcaggaactcttcccgagtctttggatcctcccggaacacacccaacattgtgctggtcacagttttgctgttcattttctgtacacctcgcattaccatacacatgtgtctacaaaataaggcaacacaggttgtttaaaggagtagacagctgctggtttggtttttaaaagcaggcctaaagattaaatctcagctcacagttaccaagtatatcgaaatatcccttcttacacaaatgttatctattaggttcatgcaaaagtaactgcggttcttgctattgaacataatggcaaaaactgcaattatctttgcagcaacctaaactttttgttcttgaagttgtcttgcaacttttatttttatcagtagttgatccttaaagcatccaaaaaggggaaaaatggaattttcttctggggtgaaagtaatataaaaggtctacagagttacttaacttctagatcaaaagaaagtcagaattctcacttgctctgccttcaggaccaagacagcactatgctagcctaggtgttcagataaatgctcaagtatactgatgtcaccaggcagaattcagataatggtgaccagagatcctgtctgagcaacctggtgacattagataccagacatagaacagagttcacaccacgtcacagaacacatatgaactttgtccacacaacagctgcaattctcttaactcatcctaacttaaagaaatgtaccaattcttggctttattttttaaatgtgtgacaaaatattagaaaaactcggcttggagcaacagagagctaaagaagaaatcaagagaagacataaaatcaagagaagacataaaaatggctattggcgtggtggctcacgccagtaatctcagtattttgggaggctgaggtgggcagatcacttgaggtcaggagtttgagatccccagcctggccaacatggtgaaatcccatctctactaaatacgaaaattagctgggtgtggtggcgggcacctgtaatcccagctatttgggaggctgaggcaggagaatcgcttgaacctgggaggcagaggttgcagtgagccaagatcacaccattgcactccagcctgggtgagagagcaagaccctgtcttgagcatttttaaaaaatggcgattgagctgggcgcaggggctcacgcctgtaatcctagcactttgggaggccgtgacgggtggatcatgaggtcaggagttcgagaccagcctggccgacatgatgaaaccccatctctattaaatatacaaaaattagccgggcatggtgacacacacctgtggtcccagctactcgggaggctgaggcaggagaatcgcttgaacccgggaggtggaggttgcagtgagccgagattgcaccactgcactccagcctgggcgacagagtgaggctccatctcaaaaaaaaaaaaggctattgattatgcaaatctctacacctgtgcttttaactccctatgcctccacaagccccatcctaccctcaaaaaatacttctcccatattctgttcctatatcagtaacagtaaatgaaagtggtaaaagagctttaggctcagggatggaaatctacagttatcatatcagttgtgtggcatcacctggtgctacaaaatatgagaagcactaaatagcaagatcacttctagtgcaccattatgacgttactaaaggcagatgcagacttacgttgcttcaaccactaccccgactccagcaggccgcaaggcttccgtgattgctacagcaatttgttttgtaaggcgctcctgaactgtggatgtgataaggagctcagtttgagagtctgacacaaacagctggaagctttttctgtctctagaacatttgaaatcttaaaaatcagacttctgtgagatttaagagccaagacacaccagcttttaccagactgctttgtctgctgactgggccacagagaggcccggattcaactccctcacctgaagtacagggctaaagagatctcagaacaccctgaagccctccagcatcactgcgggaaggaattagaatagcaattatctcatacctgtgcagttagaacaacacagtactggttaccaagcacctccatggaggtaaagtagtgcagcaaataaatagcctgcaacagggttaacaaaggggctgcagtccaattattgaattgtgcttagagcaatgttgaaaaccaacaatttaacctaaataatatagttcctgtcctgaataaaatgacttgtcttttaattcatacaggaatattcattgcagcactgcatctatttgaaaactgatgaaaccccccagtatctatcagagctggtataggttacgccaagccatggcatatacggtaggattctagacagccaccagaatgaatgagatagttacatggatgtggcaaaaatgtttaagatttgttaaatgaaaaaaagcagggaaaaaagcaaggctgattatgtataaaatgagcccatttttgtttaaacataatccaaataaattgatttgaaaatgcaggtatatgcatgaaaatgtgaaggaatgtgcaaatacaacagtgatttcttctggaagcttgaaacagtagactttttatagtcctaagaggttttacatttttataagtcatacttatcgcactagtaataaaacaaaaaatactttttgtgtaggaaaaatgttttctgtagccaggcacagtggctcatgcctgtaatcccagcactttgggaggccaaggtgggcagatcacctgaggtcggaagttcgagaccagcctgatcaatatggtgaaaccccgtctctactagaaatacaaaaattagccaaggcatggtgatgcactcttataatctcagctacttggaaggctgaggctgcagtgagccgagattgcaccactgcactccagcctgggtgacagagcaagactctgtctcaaaaataaaaatttaaaaaaagaaaaaaaagaaaaatgttttctgttaatacagatttttaaagcttaccttgtagtcttctactatagatttctacaatcctagaaaagaaagaattgttttagttaatcacaaatcatttgaagtaaaattgataagccttcctcataaaacaaaaaggacattgttgaagcaagtgggctgcaagaggaaataaagcttatggcaagatgacagaaagatacaagtaccacagggagatgtagtctaaagtcaacttgattggattgaaggatgcaaagtattgttcctgggtatgcctgtgagggtgttgccaaaggagattaacatttgagtcagtgggctgggaaaggcagacccacacttaatctgggtgggcacaatctcatcagctgccagcgaatacaaagcaggcagaaatatatgaaaaggcaagagtggccttgactcccagcctacatctttctccaatgctggctgcttcctgccctcaaacatcgaactccaagttcttcagttttgagactcagactggctctccttgctcctcaagcttgcagacagcctattgtgggaccctgcgatcatgtaagtcaatacttaataaactcccctttatatatatatatatatctcctattagttctgtccctctagggaacccttactaatacagaagaccaccaaccactgcagagtggtgcttcctgatgtccccagaaagagaattaatgagtctccaactgtgacgttcacttaggaaaaacagagatgagtaacaaaattttaaagttccaaatcatcaattttagatcatgtctcaagtgctctgattaatcatattgttttatcagagcttaaaattcaagttaaaaataaaaagactttgttaattaatagcacaccacggtcaactactataccaactaaacctattaggagaatcagattggaactgattagacttcttcagacacctcttcataagataggtttatgtaagcacttagtaagattaacccccaagaaataaaagcctcctgatcttaacttatagcacaatctgtcaagtgataaattttcctctttttttttttttttttgagatggagtcttgttcttgccatccaggctggagtgcaatggcatgatctcagctcactgcaacctctgcctcctgggttcaagcgattctcctgcctcagcttcctgagtagctgggactataggcacccgtcaccatgctcggctaatttttgtatttttagtagagacagggtttcaccatgttggccaggctggtctcgaacttctgacctcgtgatctgcccaccacagtctcccaaaatgctaggattacaggcgtgagcccctgtgcccagccagaattttcccctttcaacatctttcattctatttatgaaatataaagatgaccacgtgacttatccatttgaagatgactattcacactgaggaccttttctttaaattcatggccttttgatcatgaattcagattcaatttatggttcacctccctatgaggcatttcctggctcttcccccaactacacgtctcagaaccaacaacttgctcctttatacccattacagccaacaaagtcagtaacaggtccgccaccccgtttaccactcagcccagagctccctgagggcagaagccatcctagctctcctttatcccagcagtagttactaggatattgaagaaatatattaatagctatattctattggtattttgaacaaaaccttagaaaggaatggtttttaagctcctagataggaggtatgtcatatttcttactaggtcaaatttctgtatatattacttctgatagtttttcaggtgattagtttgttatatatgtaggagatgccattgattttaaagttagtaatgttttccttctcgtattcaccattctttttctggagtagaacttcaggtgccacattggacaatagtggtaacactgggcaaccatgttttgctccacacttcaataggaatgcctctaggatttcactaccacccacagtgcctgcctgcttctggcagacagctgctctcatggcaggaggaacattcccatagatttttactgagtgcctgctatgtatgtgattatatggtgaacatgctctctgtgctctgagagcttattatttctaaaccctagtttattagttttcttttacaagtgaggagtaaatatgaaacctaacacatcttttcagcatgtcatgtagcttccctagattaaaaaaaaaaatctttattttgctgtcattctggaaagataatttgttgagaggtatttgctgggaaccgaattctagtttgacactgatatctatcttgcccttcagtattgctgttggcaaaccaattcagtgtaactgctgttgccttttagataatcgatatttctttctttggctgcttttatattaactatattttataagtatatactgcaatttactatgttttaatccaagtagggatttaatttgacttatttggaatttattaggctttctgaagaccgatattttgcatgtgttctagaaacttttttagccattatcttctctaacgttgcatctagcacattgcctctgttatctccaggaatttcaattaagggcatattataccctcccagtcttccatgtttcttaaattctcattcatattttctacctgtctttgcgctgcattcagcacaatttctttagacctttcttcccaatcaccgtatttaatctatgtctaatctatttaatgagtatactggacttcagtttcatttttttaatttctaaaagttatatttcctcctcttcccaatctgcctggctaattctgcaagtttcttatccctttgtcaatttttttttgtttgttttttggcacggagtcttgctctgttgcccaggctggagtgcagcagcacaatcttagctcattggaacctccacctcccgcattcaagcaattctctacctcaggttcccaagtagctgcgattacaggtgcctgccaccacacccagctaatttttgtatttttagtagagacagggtttcaccatgttggccaggccggtcttgaactcctgacctcatgatccgcctgccttggcctcccaaagtgctgggattaaaggtgtgagccaccacgcccgatctcctttgtcaatttttttatatataagtaggttctttttttttttttttttttcccccgagacagagtctccctcttgtcacccaggctggagtgcaatggcacaatctcagctcactgcaacctctgcctcccaggttcaagcatttctcctgcctcagcctcccaagtagctgggattagcggcacccgccaccacatccagctaatttgtttttttttttaattattattatactttaagttctagggtacatgtgcacaacgtgcaggtttgttacatatgtatgtaagtgccacgttggtgtgctgcactcgttaactcatcatttacattaggtatatctcctaatgctatccctccctgctccccacgacaggccccggtgtgtgtttcctaccctgtgtccaagtgttctcattgttcaattgtcacctatgagtgagaacatgcagggtttggttttctgtccttgcgatagtttgctcagaatgatggtttccagcttcatccatgtccctacaaaggacatgaactcatcttttgttatggctgcatagtattccatggtgtataagtgccacattttcttaatccagtctatcactgatggacatttgggttggttccaagtctttgctattgtgaatagtgccacaataaacatacgtgtgcatgtgctggaggcatcacgctacctgacttcaaactatactacaaggctacagtaaccaaaacagcatggtgctggtaccaaaacagagatatagaccaatggaacagaacagagccctcagaaataataccacacatctacagccatctgatctttgacaaacatgacaaaaacaagaaatggggaaaacataaatggtgctgggaaaactgcctagccatatgtagaaagctgaaactggatcccttccttacaccttatacaaaaattaattccagatggattaaacacttaaatgttagacctaaaaccataaaaaccctagaagaaaacctagacaataccattcaggacataggcatgggcaaggacttcatgactaaaacaccaaaagcaatggcaacaaaagccaaaattgacaaatgggatctaattaaactaaagagcttctgcacagcaaaagaaactaccatcacagtgaacaggcaacctacagaatgggagaaaatttttatgatctacccatctgacaaagggctaatatccagaatctacaaagaactttaacaaatttacaagaaaatatcaaacaaccccatcaaaaagtgggtgaaggatatgaacagacacttctcaaaagaagacatttatgcagccaacagacacacgaaaaaatgctcctcatcactggccatcagagaaatgcaaatcaaaaccacaatgagataccatctcacaccagttagaatggcaatcattaaaaagtcaggaaacaacaggtgctggagaggatgtggagaaataggaacacttttacactgttggtgggactgtaaactagttcaaccattgtggaagacggtgtggcgattcctcagggatctagaactagaaataccatttgacccagccatcccattactgggtatataaccaaaggattataaatcatgctgctataaagacacatgcacacatatgtttattgcagcactactcacaatagtaatttttgtatttttagtagagatggtgtttcaccatgttggccaggctggtctcgaactactgacctcaggtgatctgcccgccttggcctcccaaagtgctgagattacaggcgtgagccactgcacccagcctattttttaatatatagtaagtccttgctcaaggtcgacaggttctcggaatctatgactttactaaaacactgagaacaaaacaaattttaccctaggctaattgatataataagaattaagctcccatagcatatttctggtcacaaaaacgtcaacaaacttccaaataaacacaaaaacacttctaatattaaacactaaaataaatgtgagtgatacatacatttaagaaagattaatggaaagatattgatttccccaattattccagttcaaggtctcaagtggctggagcttttcccagcagttcagggtacaaggcaggaactgaccctggacaggacactatcccatcacagggcacacacatccacctactctcactcagactgggaccactcagatcagatacgccaaatcacctaacgtgtgcatctttgggatgtgggaggaaacagaagcacctggaggaaactcacagatgtgggagaaaacatgcaaactccacacagacagtgggtcccagcaaggaatttttttttctcaatcatactgaaatgacattgaatgaaacaacattattccaggactgttatatgccactttgcctgaagtcatttcgcttcaagttgcagtctccaagaacccatcgacaacgtaaagtgaggacttactgtacttgttttatatcctatctctgatagttctactatctgccctcttccatcgtgtttgtctgactcgactcatggtactccttggaacttcatctttgggtatccttccaagcctggataaaagtgcatcagagaacatgcactagtttctgctagctgcctgcaaggatacctctatggggatgttttatttatttttatttatttatttttgagacagagtttttgctcttgcccaggctggagtgcaatggtgcgatctcagctcactgcaacctctacctcccgggttcaagcaattctcctgcctcagcctcctgagtagctgggactacaggcgtgtgccaccatgcccagctaatttttgtatttttagtagagatggggtttcaccatgctggtcaggctggtctcaaactgctgacctcaggtgacccacctgccttggcctcccaaagtgctgagattataggcatgatccaccatgcctggccttatggggtcgtttgaaactaaattattccatttgattttttgaaggccacacaggtagtactaattctgatcccaaactttatgaatgtgtctatgagttcctttttctttttcctgctcttcctagaataatgctaataggtaagtatcgtccttgatttgggatgggaaaagggaggacagaatccagactgtggctttagtgctaattccagtggattctcactagaattgcctcatgctttcccgaaagtgtaaaatgtacatatgcattatatcttgatacgctgtgccaagaggggcattattaatctagttcaccacacccagcatcagtagttgtcagttttaatctaaaccattcttacattcttggactaaacatccctgggtcatgttgaaaacagtacttctatactagcctgacattttaagattcttacaactacattaatcagtgagatttgcctatcattttttttttttaatgctaggcttatcaggctttgttatcaagaataggcagcttcatcaaattaattgacacttcacaggtttctctacgctcttgaattatttatacacatgcaaaatttgtggttacttgaaagcttgaaagaacacttataaaactgactgggtccaggcactttcccccaaatcattaatttgaccttttctaatggttattaatgtatgcaggctttcaaactcttggtccattcctttctctccccatctttttaaaaaacgtattcatcaagatgtaaagatttataaagcatatttttagttacatatcgtctcattcctagatatcagactccccagcaacctatgatacaagattttcaacttgtagatttgtgatttctgttctttggctttttctaaattattctaaataaggagtttggactttaactgaaaagctgtggtgagccaccaaaggagcagcatgatccaatccacactttagaaagaacatcccagcagctcatgagggcaaactgaaggatcctcagagatgagaggcagggaggaggcaggagcttaacattccctccaggaggaagataagaaaggcccagcaaagacctgcagcagggagggcaggaaggcaggaagtgggggtgctgcacctgccgggcagtgagcacacgcagcagtggatgggttctgcctcactcctcaccccaaaatacactccagatggagcaaagatttaaatataataatgtggccatacaagtaccaaaaaaaaaagaagtttgtgaactacagaaaagttttaaacttctttatggaaatataatactataaagcaaaatcaaaagacaaatgacgagctgggaagcattgtctgtagcacctgacctgactgctttaacattcagagcttgtgcaaaccaagaataaaaagacaaataactcagtggaaaaattaatactggagctaagaacaggaagtgtctgaatagattcaacctcgctctattaaggaaatgcaaattaaaatagatactattttttacttatcagtttggcaaagatttaaaagtgtgatgaaaagtgtgttggccgaagtgtggagaaacatacaccaccccttacctatgtatctatttattagagtataaactggcatggtctctttggagagcaatttcataatatcaaaaattcggctaccctttacccatcaagttccatactagtaatttaaacttcagatagattcaaagcacacaaagataataaaatttgttcaccagggtacttttttactttttggcaagtctcaaactgcaaactgtacttatctatagcaaatactggttaaatgaattgtattaatcaaagaaatattaggtagctatgaaaagaaacttggactttttggactaaaagatgtccaaagaacttcaaggtattttaaatttttaaaaagctggccagggccaggcgcggtggctcactcccgtaatcccagcactttgggaggctggggtgagcagatcacctgaggttaggagttcaagaccagtcttgccaacatgttgaaaccccatctctactaaaaatacaaaaattagctatgcgtggtggtacacgcctgtaatcccagctactcaggaggctgaggcaggagaatcgcttgaacccaggaggtggaggctgcagtgagcccagatagtgccactgcactccagcctgggcgacagagaaagaccctgtctcaaaaaaaaaaaaaaaaaaaaaaaagctggccgggtgcagtgactcatgcctgtaatcccagcatttgggaggccaaggcaggctgatcacttgaggccaggagttcgaggccagcttggccaacatggagaaaccctgtctttactgaaaatacaaaaattagccaggcatggtggtgcacatcagtaatcccagctactggggaggctgaggcaggagaatcacttgaacccaggaggcagaggttgcagtgagccaaaatcgcaccactgcactccagcctggccgacaaagcaagactccatctcaaaaaaacaccaaataaaataaaattttaaaaagcaagttgtagtacagaatataagatatgatcttatgtttgtgcttgcataaatattttccagaaggatagtgaaagaaatctctagttctaactctggggaatgaaaataggtaagaaaagttttcactttattcactcatttgtatttaaatggtatgttgcttttatagtcaaaaaagaaaaaaaaatactgctccctctgtaatctaatactcacctcacttactcttacttccatcagtcaatctggttcccatccactggaataggccttgctcctaccctctgactggtctttgctcatgcattaactatacctagagaaacttctcccccatttagaattctgctcatccctccacctccaggtctattcacctgccaggccacagccatcatggctcctctgaacttggagctacagcaggcatttccatggcacttgcagtcttgccctgtgcactctccttgagggtggctgccatgtcctgcttctttagcctccacagtagctggcacagtgcccacccaacaggtcagccatggctacctgagatactacaactctaaattcaagatttcgtacattcactcaattatttatttatttatttatttttagtgacacagagtcttgctctgtcacgagactggagtgcagtggtgaaatctcggctcactgcaacctccgcctcccaggttcaagcgattcttccatctcagcctccgaagtagctgggattacaggcgcatgctaccatgccctgctaattttggtatttttagtagagatggggtttcaccatgttggccaggctggtctggaactcctgacctcaagtgatctgcccacctcggcctcccaaagtgctgagattacaggcatgagccacctcacccagccgaggctcagttatttctaagggaagaaaatgaatacatgttcaatggcttttcagcaacaaaagaaagttctattcaaactaagtttattctagaattctactagagttgagccagatcaactcacttctggcattttcttgttacttaaggctttactgcttgatatttgacttcactggcactgaaaggtcattcatttaaaggcaagcatataacaaacttcatatataagattaaaatgagcagtgaagttttgctaagacattcagcttttattcctcttcattctctaaatattcttacttcttataaggaataagtagttggataaaatcttagtcttcttttctatttaatagactctttattcaaattttttgcaaaatatttgaaagcaacatacacttggttctttggcttcatgttccattttattcttaaattttaatcctattagtctaaggacaaatccccatgctaataatcaactcctttgtattgtttcataaaagcttaattatttgagatcttttcctttcacttggaaaggaaataactaagattatttccttctaccaccaggttgccatttattgtatgatctcactgaatcactcaagagtccatttcccataaagtgttaatcatgatcaacagttggtttttcagagaaggctgttacattaagaccaaggcctaatgtgatctgccaagcttttttacactatgaaactatccattacacctttcacatatggacagtctgttataggcatcagcagtgctggaatttctatatgggcaaggtatagggttagcaatcttgctgacagggaggcccaggggactgggcctacagctatgtttgcacagtaagcatgctgattttacttagactgtatattataaaaccataagaataaccaattttagtaaagatacttttactcacagttgacatgaaattggtttaatacatcattagttgagggtaagttactgggaagggagtcgttaataaaaattatagtaagattaattactcccaatcactaccaacacactttttctcagcaacttttcagcactgccaccagggatggatcacacgcaagcagccagaatgtttctggatttgtgctaagagccttattccagtgaagcaattacagctatgatataatattctttcatggtgccaagcagccctatctaatagcaaaatagctgagcaggaatgaggtcagaaactggggaagttaaatttgtctcttctacccactttcttattgatccccagaggaaatgaatgagaaagtggaagtgaaaacaaagtaacaggaacaactttagagggcagttgtcagattgctggagtagttttttttttacagattccaacacagaattgagaaatatcaggaccaccatttcacaactgtgttaaatcccagggcctgcataaagaaacaggaacacatcagagccacagcacagtcaactggtcacagagactcatttattcctcttcttttatttttatttttttgagatagggtcttactccatcgcccaggctggagtgcaatggcacaatctcggctcactgcaagctctgcctcccgggttcaagtaattctcctgcctcagcctcctgattagctgggattacaggtgtgcgccaccacgcccagctaatctttgtatttttagtagagatggggtttcaccatgttggtgaggctggtctcaaactcctgacctcaagtgatccgcccgcctcagcctcccaaagtgctgggattacaagtgtgaaagacggcacccggccgagactcatttatttcaattatgatatggtcactataacctcaagttattcaaacttagcttgattatttttgaaaaaaaaaaagagtaggaacactttacccgaccccttcatcttgttcttaactttctctctctctccacacacacacacacctcccagtatttcctccatcactcaaaattcactaactttatacgaagaaacaacaaggatatttaagggcaataaaatattggtggctggggcctaccagagatatctgaacacaaacccccatgttgacttccagttaaacacagatgaacgtgtatgtacatcacctctcctaaaacccaaataaaaaaggcagtaagggaattttttaaggcatgaacccacaggataaacaacagaaaagaagattgtagcaggaaagagaaatgagagcgaggagcgtgaacactgtatcagaataaagctgtgcaaagccaaggcaggcagtcttgtgtttgcagaaacaaagaacctagacatgaacggactggcctgcaggacccctgagatatgcctggaggcatccagtgcagagcaaggcagggttgaggctggggatcccacagggaagtttcattacaagtctgaaagcagtgttgtatgaaagcaaagaaggtgagcactccccttgacaaggatagaagagtcctcaggcctgacaacaagttcgacagcagagcactgcagctagacccctgcccagcttcttccccaacccctcactgttagctaaaccccccttaaaggatggggctggactgaaggtaagctcaggacctctccagtcagagaaggctctgcagagaaagaggtgggctgagacttccaggatgtatgtatctatggaagaaagggtgggaagtggaagaggaagcaggcagtaggggacgagaaggaaggggcatctgtgtttcagaccctccaagtctttaagttgcaatatgacttccaagttagatccatacaggtaaagagagaaagcctgatgagatagattctcagcagatgagggcaggtcctataaacctgtattcttgttcactgcacagtcacacttacctcgcaagtttgctgaggccaaggacttgcttgttaggaagataaccaatatggaccttcagagaagagacggaaatcattagctgagtgaaaatacagtgccttctttgtgacaaaataaggaaatatagaaagaatatagtacacttttatgtaatttatcacgacaatgtattaccttgaaaacatctggaactgttaagacttagaaaatgaaacatttatatatgtatttttaaaattacataaatgcagtaaaagcaaaatatataagtatgagtctattaatcaaataacaaacttgtacagttgtccgttggtaaatgcgggagattgcttccaggacccctgtgtatacccaaatcctgcatactcaagtcccgcagtcggccctgcagaacctgcatatatgaaaagttgcccctccatctatacaggttttgtatcctgcaaatactgtagaatttttgatcagtgtttgcttgaaaaagagccatgtctaagtggacccatgcagttcaaattcatgttgttcaagagtcaattgcatggccctgacacttacctgtgaagttgaactcttgacacaaatctgaaagtttcttctttatggaggagaaacattctcaaggaaaggcaaatgatctcatagcaacactaaaatgtatacaggaaagcctcctttaaatggcaaaaactgtaagcataagtattgccattccacacatcacagcagccttaagatcccacctcacagccttaagatcccaccgcaaagccctgcagcacagaaggtctccacacccttttgtgcttggcttcctggtttctaagctgctagagagtgcaccatcttccttttttttttttttttttttgagatggagtctcactctgtcgcccaggctggagtacagtggcccagtcttggctcactgcaagctccgcctccaaggttcaagcaattcccctgccttagcctcctgagtagccgggactacaggcgcctgccaccacacccagctaatttttgtatttttagtagagatggtgtttcaccgtgttagccaggatggtttcgatctcctgaccttgtgatctgcccgcctcggcctcccaaagagttgggattacaggcgtgagccaccacgcccggccccatcttcctaactggagaaaaagggcactgctaccaccatggcttggcaagaacctgcaccctaagaactaagttttaaaggacccaatatacagccaggccatttctgttatcttaaatggcaccaattaatatcaaatataaaagttactcttttggggccaaatactacatacgaaaaacattagttctctgaaaagattaatagagtaaatggtcacttgtaggcaattaattaaccgaatataaaattagagactcaacggcatcatggtttgctaacactgttttcattgttcacttactatttacataattgatctagtagtacttagtgattttttcccccatccattggcactatgctttaggaatttgagaagtccacctcattgccttcctggttggcaggaggaaaaagtaaaatagcacctgaacattgaggatttcaaagaaaaattagagagttaaaactttcccatgaaccaaggtcttctatgctgtctgaaatttttacatttccatgcagacacggaatttgttcattgtttatactatttttggtcttaagatcctaggtaatttaaatgtccatttcacaaaatcactagataggccaggagtggtggctcacacctgtaattccaacattttgggtggattgcctgaggtcaggagttcaagaccagcctggccaacatggtgagaccccatctctactaaaaatacaaaaattagccaggcgtggtggcgggtgcctgtaatcccagctattcgagaggctgaagcagaagaattgcttgaacctgggaggcggaggttgcagtgagccgagatcgcaccactgcactccagcctaggcaacaagagcgaaactgtctcaaaaaaaaaaaaaaaatcactaaataatatatttttaaaacaaaggtagcaaaaacacaaacactgaggaagtaatagcagaaagtaacaggataaaatggtgacaggctgagtacagaatcagtgccttggatctggctgcagccaagccactaactctctctatcctcttgaacaagtcacaggctttctgtgcctaatttgctcaccaatagattccctttcaaagattccttcattatcaattgcaggatttccagatacgatatggcttctgatgtgatgtatctgggttttctgattgctttctcttcttttctttttagagacaaggtcttgttctgtcacccaggttggggtacagtggcatgatcatagttcactgtaacctgaaactcctgagctcaagcaatcttcctgcctcagactcccaaaaagtagctaggactacaggtatgcacccaccatgcccaattaattttaaaaaaaaatttattttgtggtagagacagtctcacttgctggtcttgaactattgacctgaagctatcctcccaccttgacttcccaagtcgctgggattacaggcatgagccacctcactcggccctgatgtgatataatatgaagtcttcagcacccttatgaagcactactctttttttttttttttttttttttggacacggattcactctcttgccaggctggagtgcagtggtgtgatctcggctcactgcagcctcgacctcctgggttcaagcgattctccaacctcaccctcccgagtagctgagaccacaggtgcatgccaccatgctagctaatttttgcctgtttttttgtttgtctgtttggttgattggttttcgttttttttttttttggttggtttttttttttttggtagagacagggttttaccatgttgcctaggttggtctcaaactcctgagctcaaagcgatacatccaccacctgccttggcctcccaaagtgttgagattactgacgtaagccaccgtgcccagcccttacgaactacttttatcagaaatgtttagccctagtcttatgaaactttagatctaatctagtttataggaaatccagaggctgaaggaaacaaatctggaaggtggggcactctgctgaacagctggcctattttcttttcagtagagaatgttatgggtgggagcactattttagaacaaaagggacttaacaggtataaccaaatgcaatgtaaatacaaatgtgtgactctcccttggattcctgtttaaacaaaccaagagtaaacatttgagacaattggagaaatttaaatatgaattcgttattagacactatttaagaattattgttaattttgtgatagtgctgctgtggataagtaagaaaatattttagggccaggtgcggtggctcacgcctgtaatcccagcactttgggaggccaaggcgggcggatcacgaggtcaggagatcaagaccatcctggctaacaccgtgaaaccccttctctactaaaaatacaacaacaaaattagccagcatggtggcaggcgcctgtagtcccagctactcaggaggctgaggtgagagaatggcgtgaacccgggaggtggagcttgcagtgagccgagatcacaccactgcaatctagcctgggcgacagagcgagactccgtctcaaaaaaaaaaaaaaaaaaaaaaaaaagcatgcacatgtactccaaaaaagtattgacagcagtattgtttgtaatagcaaaaaaaaaaaaaaaaaaaaaagaggcaacaatacaaaggtccaccaagagcagaatagataaattgtggtatatttgtacaatggaataagatataacaatgaaaataaactacaatgacaggcaatgacatcaatgaatccgactatgtagaacaagagaggccagacacaaagagtacatatcgtagaatctttccacttacatatagttgaaaaacaagaaaacgaatccatagggttataagttgataaactgatacaaaggatggattagggattaagaagagaaaagaaatgaggtgagcttccaggatgctacacatattgtagttgtgggggtttcgttgttgtttgtttgtttgtttgtttgacagggtctggcagtctggctctgttgcccaggctaggatatagtggcgcaatctcggctcactgcaacccctgcctcttggactcaagccatcctcccatctcagcctcccgagtagctggcagtacaggcatgcaccaccatgcccaggtaatttttatttttatcttggtagagatggggtctcaccatgttgcccaggctggtcttgaactcctgggttcaagcaatccacctacctcagccttccaaagtgctgggattacaggcatgaaccaccgtgccagcctattctagttcttgatctctgaagtggtaaggaacacccttaagttttatgcattttctatctatatattatttccataaaaaagtgaaaagatacaatactttaacaaagacaaaaatgaagcaaatgttaacactttaactttagttgatgggtatataagtattcataacactgcttcttgtaagtcttctgtttaaagattattaataaagagtcaaaattaaataaaattatgatgggggtagggaaatgggacaactctttgttctataccacatgttctcaaaggtatgttaagtagtcattcctagacaacatctaataactaactcagatttaaattcctccaattgtctcaaatgttttacttttggtttgtttaaacaggaatccaatggagagtcacacatttgtatttacactgcatttggttatacctcttaagtcccttttgtcctaaaatagtgctcccacccataatattctctattgaaaagagaataggccagctgttcagcagagtgccccaccttctggatttgttccattcagcctctggatttcctgtaaactagattagatctaaagtttcataagactaggactaaacatttctgacaaaagaaattcacagaggtgctgaggaatctaatgcattagattcacttttcctaatatagaaaggaatggaaacaaatccacaaataccataacctctgtcacaagaaattctgcaattattgttgctcatgacatgccatacatacatatctatcttggatcaaacattattcaagttaaaataaagggcatctctagattgggatgctaataataaataaataaaggttaaaggttttcagagcctgtagtagctacaaaaaaaaaaaaagagagagagagatgctacttaaacctcattattttaacctatgaacctggtatttaacatgaaaggcttatcctgagagccttctgctactttggttttgttttttaagtttcaagttattagtcaggttaataaagaataaccatatatgtataattgtaaatacctgagatatcagcaattggcagctaaaaattttaaatataattattctaattgaaaaactttcactatgttttaaattgctgggaaacaacaaagagaaccttacctttccaacaaatggaaccaagtgatgctcacacatggaaaacatgtctatgtccttcacaatcaccatctcatcatgatcttcatcaaatatagcatcgtttaggacatctgaaatcagaggcttgctttagtaacatgtccaattttatagaaaggtagaattatggataaacatgaatagacagtcaacataaacgaacgttaatcctccctaaaatattaagggaatacaaattaaaactagatatttttccttatcaaagtagcaaagtccttttctgtaagtaacatttaaaaatccttgatacagtgttacatgaaaaatgcaggattatgaacatatttgcagtatggaagaggaaggagaacggagggaggaaaggaaaaattataccaaaataaaacagtggctatttctggcagtagaaatgggccactttcactttcttccttacattttcttctactttatattttgtctataatcaatatgtagaaaaccatatctgagaaaaagactaatccttagccctctgacttctgaggccagatccagacacctgtaaacctgacctctattatcaattccccaagtaattttctacatttgtaaagtgttctatatattgtaggctagcatcagacttattctaaacagttgccttcctaaggaaataaatcctacagtttgtgtgtatatgcctctctgggaaggctttggaagataagcagtgtcttgtttaagctgtggaccctggcacttccagccagacatacaatagacattaaaaaaaaaaaaagctttatttttaaaaattgcactgacttatcctcaactatgctatgtgcaaaagaaaagattaatcagatgatgcctgagagcactctgagcttcctaacattcggtgactgcaagaacatcctgtcctggatgctgaagagggatagagggaaacaagccacattccccaccaatcataatatagccaagctattgataataggcaggtacccaaacaacattgtagataaatgccatatgacatggaaacttcttcagctatattgtcaaatgagaaaagaagctacaaagaaatacagtaggatttcattttcggaaaataaatatagacatagaaaaaaactgtactgatacctagacagcttggcagactagatataataagacacgtagctgagtaatttcaaggatttgggggatatgcaatatacataatagaattagacagagaagggaagggatgtattagagctttgcacctgcagctctttcccctcagaaaggcaggcggctgagtgagtcacaggaagatggacaaatgtccacccacactgcctgaccttcagtggctccactgctactagaatagggggctcacagagaccaagtcatcacgtaaaccacagttattaccccaagtcaggctattcagagatacatttgactgtgtcatagaaaagtcattagtgtggtcaagaaaggcgaacatggcagggttagacacatacagacaaacagagacacccctggtagaagtggctgataacatcccaggagaaaaaggcgcagtgtcactcactgagtatttcttctaccacagcacttttctatgctgaatattctgccctaccttcagtcttatttctgaaaagaagaccaaaaatagatccttaatgtttccaaaagtttcttggatttctccccaagattttaatatggtatgattgccacatatagcttactaaaatctttagtcacacaagatatattcctggaaggaaaaacaaaccaaaaaaatgtcttaaagaaaaaacaagagagaagcattaaatataggaagcatttgttttctctggcaaagaatgagagcgtccccatcctaagctctgacgacaaccatatggcccatgttaaagtcagcccttcaactcaggcgaagtgaagagctggctccaggctgggtgcagtggctcatgcctgtaatcccagcactctgggaggcagaggtaggtggatcacctgaggtcaggtgtttgagaccagcctggccaacatggtcaaaccctgtctctactgaaaatacaaaaataagccaggcgtggtggtgcatgcctgtagtcccagctactcggggggctgagacaggagaattgcttgaacccgggatgtggaggctgcagtgagccgagatcatgtcactgtactctagcctgggcaagagagaacaagactccgtctcaaaaaaaaaaaaaaaaaaaaaaaaagatctggctccatcacttactagttattaggccttgggcaaggtactctgtacctcagtcttctcggctataaaatgagcataaagtgcctgcttcacagggtgtcatgaggattaaatgggcacatgtgtttagaactatgcaggcggagcaagtgctagttattgttattactattattattacaattaagattgagggagctgcaaagctatgtatctcccatgcatattgaggtacatcaaaatttaaaaagcaataatttgccttaacagagtacagaaaaggaaaaatagtaacttggtggagaaacctggcagaggctaccttaaccaaatgattaaggttaactttgccagtaacaggacatactgacatcaggtagctcctgataggacaccatgagaagggcacatcacctctgcggtattcttcccaaaaatccataactgcagcctaatcatcagacaaatctagggacacaaaatatctaaacaagtactcttagaaagcatcaggccaggcacagtggctcacacctgtaatcccagcactttggtagggcaaggtgggaggatcacttgagcccagcattctgagaccagcctaggtaacactgcaatatcccatctccacaaaaaataagaaaaaaattagccaggcacggcagcacactcctatagtcatagctattcaggaggctaaggcaggaggatcacttaagcccagcagttcaatgctacaatgagctatgattgcaccactccactccaaatagagtgacagggcaagatcctgtctctattttttaagtgtttaaaaattaaaaaaaaaaattaaggcatcaaagtcatgaaagacacagaaagactaaggaattgtcagattgtaggagactagagaaatgacaatgaaaatctgaataaagtctgtagtttaaataatagtattgtaccaatattactttttaaaataaagtatatttttattattttttctttttttgagacagagtcttgctctgtcgcccaggctggagtgcagtggcatgatctcggctcactgcaagctctgcctcccaggttcacaccattctcctgcctcagcctcctaagtagctgggactacaggcgtctgccaccaccccagctaattttttgtatttttagtagagatggggtttcaccatgccagccaggatggtctcgatctcctgacctcgtgatccacccgcctcagcctcccaaagtgctgggattatgggcgtgagccaccgtacctggccttattattattattattattttagagatgggatcttgatatattgctcaagctagtcttaaactccacggctcaagccatcctcccaccttggtctcccaagtagctgggactacaggcatgcaccaccacctggctccaatattaatttcttttttgagatgaagtctcactctgtcacccaggctggagtgcaatggcgtggtctcggctcactgcaaccttcgcctcccgggttcaagcgattctcctgcctcagcctcccgagtagctgggactacaggcacgtgccaccaaactcagctaatttttttgtatttttagtagagacggggtttcactatgttggccaggctggtctcgaactcctgacctcgtgatctgccagccttggccccccaaagtgctgagattacaggcgtgagccaccatgcccagccagtattaatttcttaaatgttgataattgtaccatggccatgtgagatgttaaacatcaggagaaactggggaaagggtatatgaaaactctctctactatctttataattattctgtaagtcagtctaaaattgtttcaaaataaaaactttctttttgaaacgaagttttgcccttgttgcccaggctggagtgcaatggcacaatctcagctcactgcaacctctgcctcccaggttcaagtaattctcctgcctcagcctcctgagtagctgggattatagacacataccaccacgcccagctaattttgtatttttagtagggatcgggtttctccatgttggtcagactggtctggaactcccgacctcaggtgacccacctgcctcagcctcccaaagtgctgggattacaggcgtgagccaccgtgcctggcccaataaaaagttttctaaaaagcaaaaggacaatgtccctcaactggaacatataaacaatggagtacactcagcaagaagatggaatgaattactgatacatgtaataacatggtttgagtctccaaagtacactacaatgtgaaagaagacatccatacacagaagagactacctatgttctagaaaaggcaaaactatagtgatagaaggcagacaggtggtttaccagggccagagaggtaggagagagaacttcactgcaaaaggaaagaaagaaacttttttgggtgatggaaatagttcctatcttcactgtatgggtggctatataactgcatacgtttgttaaaattcacattgtacatgtaaagtaggtaaattttacataagataagtgacaccttaataaagctaacttcaaacataatttttaggctgggtgcggtggctcacatctgtaattctagcactttgggaggcgaaggtgagaacattgctagaggccaagagttcaagaccagactgcccaacctagccagactctgtttttaccaaaaaaaaaaaaaaaaaaaaaaaaagggtgggggtggagccaagatggccgaatagggacagctccagtctacagctcccagtgtgagcaacgcataagacgggtgatttctgcatttctaactgaggtatcgggttcatctcactggggagtgtcggacagtgggtgcaggacagggggtgcagcgcacccagtgagccaaagcagggcgaggcgtcacctcacccgggaagcacaaggggtcagggaattccctttcctagtcaaagaaagcggtgacagatggcacctggaaaatcaggtcactcccaccctaatactgcacttttccaacgatcttagcaaacggcacaccaggagataatatcctgcgcttggctcggagggtcctactcccacagatcctcgctcattgctagcacagcagtctgagatcaaactgcaaggcggcagcgaggctgggggaggggcacccgccattgccgaggcttgagtaggtaaacaaagcggctgggaagcttgaactgggtggagcccaccgcagctcaaggagccctgcctgcctccgtagactccacctctgggggcacggcatagccgaacaaaaggcagcagaaacttctgcagacttaaaagtccctgtctgacagcttggaagacagcagtggttctcccagcatgcagcctgagatctgagaatggacagactgcctcctaaagtgggtccctgacccccgagtagcctaactgggaggcacccccaaggaggggcagactgacacctcacacagccgggtactcctctgagacaaaacttccagaggaacgatcaggcagcaacatttgctgttcaccaatatccactgttctgcagcctccgctgctaatacccaggcaaacagggtctggagtggacctccagcaaactccaacagaccggcagctgagggtcctgactgttagaaggaaaactaacaaacaaaaaagacatccacaccaaaatcccatctgtacatcaccatcatcaaagaccaaaggtagataaaaccacaaagacagggaaaaaacagagcagaaaaactggaaactctaaacatcagagtgcatctcctcctccaaaggaacgcagctcctcaccagcaacggaacaaagccagacggagaatgactttgacgaattgagagaaaaaggcttcagacgaacaaactactccaagctaaaggaggaatttcgaacccatggcaaagaagttaaaaacctttaaaaaaattagacgaatggctaactagaataaccaatgcagagaagtccttaaaggacctgatggagctgaaaaccatggcacgagaactacgtgatgaatgcacaagcctcagtagctgattcgatcaactggaagaaagggtatcagtgatggaagatcaaatgaatgaaatgaagcaagaagagaagtttagagaaaaaagaataaaaagaaatgaacaaagcctccaagaaatatgggactatgtgaaaggaccaaatctatatctgattggtgtacctgaaagtgacagggagaatggaaccaagttggaaaacactctgcaggatatcatccaggagaacttccccaatctagcaaggcaggccaacattcagattcaggaaatacagagaatgccacaaagatactcctcgagaagagcaactccaagacacataattgtcagattcaccaaagttgaaatgaaggaaaaaatgttaagggcagccagagagaaaggtcaggttacccacaaagggaagcccatcggactaacagctgatctctcggcagaaactctacaagccagaagagagtgggggccaatattcaacattcttaaagaaaagaattttcaacccagaatttcatatccagccaaactaagcttcataagtgaaggagaaataaaatcctttacagacaagcaaatgctgagagattttgtcaccaccacgcctgccctacaagagctcctgaaagaagcactaaacatggaaaggaacaaccggtaccagccactgaaaaaacatgccaaattgtaaagaccattgaggctaggaaaaaactgcatcaactaacgagcaaaataaccagctaacatcataatgacaggatcaaattcacacataacaatattaaccttaaatgtaaatgggctaaatgctccaattaaaagacacagaatggcaaattggataaaaagtcaagacccatcagtgtgctgtattcaggaaacccatctcacgtgcagagacacacataggctcaaaataaagggatggaggaagatctaccaagcaaatggaaaacaacaaaaggcaggggttgcaatcctagtctctgataaaacagactttaaaccaacaaagatcaaaagagacaaagaaggccattacataatggtaaagggatcaattcaattcaacaagaagagctaactatcctaaatatatatgcacccaatacaggagcacccagattcataaagcaagtccttagagacctacaaagagacttagactcccacacaataataatgggagactttaacaccccactgtcaacattagacagatcaaagagacagaaagttaacaaggatatccaggaattgaacttagctctgcaccaagcagacctaacagacatctacagaactctccaccccaaatcaacagaatatacattcttctcagcaccacatcacacttattccaaaattgacggaagtaaaacactcctcagcaaatgtaaaagaacagaaattataacaaactgtctctcagaccacagtgcaatcaaactagaactcaggattaataaattcactcaaaactgctcaactacatgaaaactgagcaacctgctcctgaatgactactgggtacataacgaaatgaaggtagacataaagatgttctttgaaactaatgagaacaaagacacaacataccagactctctgggacacatttaaagcagtgtgtagagggaaatttatagcactaaatgcccacaagagaaagcaggaaagatctaaaattgacaccctaacatcacaattaaaagaactagagaagcaagagcaaacatattcaaaagctagcagaaggcaagaaataactaagatcagagcagaactgaaggagatagagacacaaaaaagccttcaaaaaatcaatgaatccaggagctggttttttgaaaagatcaataaaattgatagaccgctagcaagactaataaagaagaaaagagagaagaatcaaatagatgcaataaaaaatgataaaggggatatcaccactgatcccacagaaatacaaactaccatcagagaatactataaacacctctatgcaaataaactagaaaatctagaagacatggataaattcctggacacacacaccctcccaagactaaacgaggaagaagttcaatctctgaatagaccaataacaggctctgaaattgaggcaataattaatagcctaccaaccaaaaaaatccaggaccagatggattcacagccgaattctaccagacatataaggaggagctggtaccattccttctgaaactattccaatcaatagaaaaagagggaatcctccctaactcattttatgaggccagcatcatcctgataccaaagtctggcagagacacaacaaaaaaagagaattttagaccaatatccctgatgaacatccatgcaaaaccctcaaaaaaatgctggctaaccgaatccagcagcacatcaaaaagcttgtccaccagatcaagtgggcttcatccctgggatgcaaggctggttcaacatatgcaaatcaataaatgtaatccagcatataaacagaatcaatgacaaaaaccacatgattatctcaatagttacagaaaagtcctgtgacaaaattcaacaacgcttcatgctaaaaactctcaataaattaggtattgatgggacatatctcaaaataataagagctatctatgacaaacccacagccaatgtcatactgaatgggcaaaaactggaagcattccctttgaaaactggcacaagacagggatgtgctctctcaccactcctattcaacatagtgctggaagttctggccagggcaatcaggcaggagaaagaaataaagggtattcaattaggaaaagaggaagtcaaatggtccctgtttgcagatgacatgattgtatatctagaaaaccccattgtctcagctcaaaatctccttaagctgataagcaacttcagcaaagtctcaggatacaaaatcaatgtgcaaaaatcacgagcatttctatacaccaataacagacaaacagagccaaatcatgagtgaactcccattcacaattgcttcaaagagaataaaatacctaggaatccaacttacaagggacataaaggacctcttcaaggagaactacaaaccactgctccataaaataaaagaggatacaaacaaatggaagaacattccatgctcatgggtgggaagaatcaatatcgcgaaaatggccatagattcaatgccatccccatcaagctaccaatgactttcttcacagaattggaaaaaactgctttaaagttcatatggaaccaaaaaagagaccgcattgccaagtcaatcctaagccaaaagaacaaagctggaggcatcacgctacctgacttcaaactatactacaaggctacagtaaccaaaacagcatggtactggtaccaaaacagagatatagaccaatggaacagaacacagccctcagaagtaatgccgcatatctacaaccatccgatctttgacaaacctgacaaaaacaagaaatggggaaaggaatccctgtttaataaatggtgctggaaaagctggccagccatatgtagaaagctgaaactggatcccttccttacaccttatacaaaaattaattcaagatggattaaacacttaaacgttagacctaaaaccataaaaaccctagaagaaaacctaggcaataccattcaggacataggcatgggcaaggacttcatgtctaaaacaccaaaagtgatggcaacaaaagccaaaattgacaaaagggatctaattaaactaaagagcttctgcacagcaaaggaaactaccatcagggtgaacaggcaacctacagaatgggagaaaatttttgcaatctactcatctgacaaagggctaatatccagaatctacaatgaactcaaacaaatttacaagaaaaaaacaaacaaccccatcaaaaagtgggtgaaggatatgaacagacacttctcaaggatatgaacagacacttctcaaaagaagacctttatgcagccaaaagacacatgaaaaaatgctcatcatcactggccatcagagaaatgcaaatcaaaaccacaatgagataccatcttacaccagttagaatggcgatcattaaaaagtcaagaaacaacaggtgctggagagaatgtggagaaacaggaacacttttacactgttagtgggactgtaaactagttcaaccattgtggaagtcagtgtggcgattcctcagggatctagaactagaaataccatttgacccagccatcccattattgggtatatacccaaaggattataaaacatgctactataaagacacatgcacacgtatgtttaccgtggcactattcacaatagcaaagacttggaagcaacccaaatgtccaacaatgatagattggattaagaaaatgtggcacatatacaccacagaatactatgcagccataaaaaatgatgagttcatgtcctttgtagagacatggatgaagctggaagccatcattctcagcaaactattgcaaggacaaaaagcaccgcatgttctcactcataggtgggaattgaacaatgagaacacttggacacaggaaggggaacatcacacaccggggcctgttgtggggtgcggggagaggggagggatagcattaggagatatacctaatgttaaatgacgagttaatgggtgcagcacaccaacatggcacatgtatacatatgtaacaaacctgcacattgtgcacatgtaccctaaaacttaaagtataataataaaaaaaaaattataaagtactgcatggtgatatgtgcctatagtcctagctattcaggcggctgaagcaggaggatcccttgaacccaggataggagtttgaggctgcagtgagctatgattacaccactgcattccagcctgggtgacagaacaagtccctgtctctaaaaatcataataataataataatttttaaaattgtagtatagtatgtagccttttgtgtaatgaaagtggaaggaggagctatgaacatatgacatatacatatgaatgtatatgcttatctgcaaaaagaaacactggaaggataaattcagaagctagtaaaaatgattacctgcaaagcagtaagagaagagacagaagggatatggatgaaagggaagcatctttgaatataatttgttacacagttttgaccttggaatcatgtaaatgttttacatactcaaaattaaatcaaagagaaaaaaaatctagtgatcctcatacagctaaatgcttcatgtgataatggaacactgatatgttgcctatgccccattttattaaaatgaaccagactataaccttgacctagccaaatcatttttcttcagtaataaagtttccctgctatatttacttatgttttgctccaacatatctaaaagctaccatctgtaggtaataagaacagaacactatcacatattgttttaatttcctgcctgttatcagcagcaagaaggtaaccctggaaacagggatttatggcattctgtttcctacggttggtcacaaccacaaacaaaatgaaagcagcctccacaagttaaaggtttgtctacaacaacaccacacaatgtcagttttcaggtatacctttctcatgtcattcataattaagcaatgtcaacaaataacactgctgggtaacatccctcaagtatttagtctgccagacccttttctgaaagtatagtaagacaggcccacaatacaagcccaagtgcttttttttttctctcgagacagggtctccctctgttgcccaggctggaatgcagcggcacaatctcagctcactgcaacctccacctcctaggctcaggtgatcctcccacctcagcctcctgagtagctgggattacaggcgcaagccaccatgcctggctaatttttgtatttttttgtagagatggggtttcgtcatgttgcccaggctggtctcaaattcctgagctcaagggatctgcctgtcttggcctcccaaagtgctgtgattacaggcatgagccaccatgcctggcccccaagtgcttatttaagcatacttcgaaacaggggttcccagactcccgctgtgggcctgttaagacacaaatctctaggccccacccctagggcttctgtttcaggtgatctgagcagacctgagaatttgcatttctaacaagttcccagaagatcctgaagctcccggtctgagaaccagagtgcccctggtttgaactatttcatgttttgtgctgctacacagaaacttcatctcttcaaaatgctcctactcaaatatataggtaaatatttaaggacaaacagacctgtttctgctgtggagaaagtgagggaaaaaggtaagaagaaactccagggaaagatttcctcaaaaggaaatttctgtccaatggagttccctctgaacccatagtataggaattagtgccgtctggagtatctggtgatcagcaccaacaactccagctctctgaggaagccggacacctgacgcatctccctggaaggacagagttaaaagacagtggaagatgacttggaacatctgagtgagcatccatcctaaaggataggaaagagctaatggagtctgcctactggttttaaaattaagagaagagacagagagaagtgcctagggcatcacacctctgcttttggctggaattaaatcaactcaaggtgctaacaaagataagcctatcctgatttggtggagaatggtccagaccctcatagttccatctaatatcagagctacctccaccagcatacagcgcttatctcatcatgcctcgtagtaccatggttatttgtgcccacgtcccacagacacactgggctataagtttctgagttaagcattatatctgaaggctttggagcttctacacacttccctgtaacaccatgcacaaagctggagttaaacatagatcttctgtgtttattcaattaatatgtctgtctttactctatgattcacttttttttctttttgagacaaggtctcgtcctgtcacccaggctggagtgcagcagtgcaatcaccactcattgtagcctccatctcccagactcaagcaatcctcccaccttggcctccccagtagctgggactagaggtatgccaccatatccagttaattttttatttttttgtagagacagagtctcattatgttgcccaggctgatcttgaactcctgggctcaagctcctcctacctcagcctcccaaagtgctcgaattacaggtgtgagccaccacgctggaccaattcacttccttaaaatacatttttaaatgaagggactccaaagaaattcatgcagccaagggaacataagaattttcagctgggcacagtggttcacgcctgtaatcccagcactttgggaggccaaggcaggtggatcaattgaggtcaggagttcaaaaccagcctggccaacatagtgaaaacccatctcttctaaaaatacaaaaattagccggatgtggtgccatgcacccgtagtcccagctacttgggaggctgaggcacgagaatcacttgaacctgggaggcgaaggttgcagtgacttcagatcacaccactgcactccagcctgggcaacagagcaagtccctgtctcaaaaaaaaaaaaaaaaaaaaaaaaaaaatcactgccatcttgttggtaatagcaaaaatagagaagagtgaatcagaagaacaattacacagtttgggtaaactcacaataaaatatgacccagcaatgaaagtcagtaaatttgggctgcatttataaatccttgaaaggatattcagtgtaaaaagcgtgtagcagaaggatatgtagagtatgagccatttaaattaagtaaaaacaatgttacatgttgtttgtaaacatatacagaaaatgaaagtataaaaatagacatgaggccggtcgcagtggctcacgcctgtaatcccagcacgttcggaggccgatgagggcaggagtacaagaccagcctggctaacatggtgaaaccccatctctactaaaaatacaaaaattagctgggtgtggtggcacatgcctgtaatcccaggtactcaggaggctgaggcaggagaatcgtttgattctgggaggcggaggttgccgtgagccaacattgcaccacagcactccagcctgggtgacagagtaaggctctgtctcaaaaaaaaaaaaaaaaaaaaaaaaagacatgaaagcaatcccagctactcaggagtctgagacagaagaactgcttgaacccggaggcggaggttgcagtgagccaagatcatgccactgcactccagtctgggcaacagagcaagactccatctcaaaaaaaaaaagaaagttagggaccaaattcagtatagtggttacctctgtagtgagatgataactggatcaggaagtgataactaggaagtttaaactatctgtattttttaaaagcaattatagcaaaatactaagatttgtcaaaacccaatgtattttgattaaacttgttcatacagtcttgtatatgtgagaaatttcattaataatatattataaaatatatattttatatataatataatatatattatataatacataatatataaaatatatatatactccatatatatatatactccatataaatatatactccatatatatatatacactccatatatatatatactccatatatatatatactccatatatatatatatactccatatatatatatactccatatatatatactccatatatatatactccatatatatatactccatatatatatatactccatatatatatactccatatatatatactccatatatatatactccatatatatatatactccatatatatatactcatatatatatactccatatatatatactcatatatatatatatactccatatatatatactccatatatatatatatactccatatatatatatactccatatatatatatatactccatatatatatatatatactccatatatatatatactccatatatatatactccataatatatggagtgtaatgctgcaatctcggcttaccgcaacctccacctcccagcttcaagcgattctcctgcctcagcctcccgagtagctgggattacaggtatgtgccaccatgcctggctaatttttgtatttttagtagagacagggtttctccatgttggtcaggctggtcttgaactcccagcctcaggtgatccgccctcctcagcctctcaaagtgctgggattacaggtgtgaaccaccgcgccaggccaataaaaatatttttttaaattaaggtcttcatacacatgctggcatttgttttttctataaaaataaaaaaattttaaaaagaaacaaacattaaaaaaacaggttacctttgcatggaggggctataggaggagggcaaggaggagtacacaggaagacccagccagcttcacgcagtgctgcaaactctttcaaaatcctccctaaatcacatcctgcaactcaaagtcttctgccctgaagatggcattaagatgttttgctttctaccacctgtttgaaaaatttgtcctacaagtaagagcatgttaaaacaaattcaaagaggaaaaaaaaatcgctctctctgctttcactttcatcatgagtacacctcttgttagagcttccgacactcacagctttttgtacttaccaagacagaatttggaaaacttggccaaaataagcatgaacccaaacattccacagactgacacaatggcggaaactaagacgactacagacaaccagtcacaccatctgctggagtgcacagagctgccgcacagctttgatatgctccacaaacttatttcataaactgtaggtttgtcagcaggaaagacctaatgtattgcaaaaaaagtaaaagtttggttattttggaaattttcactccatctttggcagagacaaattcatatgttgctcttagctattaaaatatagccaaagctattgaaatagatgttctcagctgccctcaaaatagtactgacatgcatgtttccttcagccaacccagtactgatgagctattctcatcctctcagccagccttgtcacaaacactacgtttcttggtaagagttcaagttttcacgtataaagttatctttactaacattttgctcctcattacaacagtaatattcatggaagtttatcggtaagatgtagaaataatcaaatgagaaagtgaaagcacataaaatccctccaccctgatgcaattactttactgcctcttaggggaaccgcacgcacagtggttcaagatgtagaatggtaaagtagaaggaatgaataaaagagtccagagctcaagggtgttggacattgatgccaaattacaagttatccttctgccccactgctcagcttctgagatgtgcatggcagtggccagggcctctctgtactgaggtaaggggaaagtacttattttaaactgtttagatttattgctggataaaactgaaggctgccaatcatgtatactattaactctcaaagttatccaagccaaagaactcgcctttctggtctcagtttactactctgaatatttctggtagaccaaaattagagccttagaaactgtctaaggaatcaaaacagtgtattcaaggagtcatttttaaaaacacacacacacttgccaaatttagttttttaactggataattttgtatatctttcacaatccagctgttaaaccgaaaatggaatttacgaaacagatggtgataacaaggtctagttcacagcagttctacagaaaaaaaaaacacaccaatctgattaaactatccatttgcttcaaaagcctctaataggctcgtcccttatcatcctacattcacttataccacgagatttcatacagatgggtgtgatggaaccatctgtaatcccatccaagtaagtaccatcagagtgcgcaagccaccatcattagtgacagatgaagagataagggatcttccttcgcaacaggggttcccaaatacagccaatcaacagggagttttggaaaatatagcgtcccaagctacccagcaaaaatctcatttactatgtgtagggatggacccaggataagtcgttttaaaatctatgtgattctggtgactggctggggtgggagcacacaggcttgagagctgagggtacatgagggttgaaaacagacccactgctggccgggcgcggtggttcacgcctgtaatctcagcactttgggaggatgaggcaggtggatcacgaggtcaggaattcgagaccagcctggccaacatggtgaaaccccatctctactaaaagtccaaaaattagccgggcacggtggcgcgtgcctgtaatcccagctattcggtaggctgaggcagatgaattgcttgaacccgagaagcggagtttgcaatgagcagagattgcgccgctgcgctctagcctgggcgacagagtgagactccgactcaaaaaaaaaaaaaaaaaaaaaaaaaaagcccggtgcggtggctcacgcctgtaatcccagcactttgggaggccgaggcaggtggatcacgaggtcaggaaatcgtgaccatcctggctaagacggacaaagtccgtctctactaaaaatacaaaaaattagctgggcgtggtggcaggcgcctgtagtcccagctactcgggaggctgaggcaggagaatggagtgaacccaggaggtggagcttgcagtgagccgagatcacgccactgcactccagcctgggagacagagcaagattctgtctcaaaaaaataaataaataaaaagaaaagagagaaaacagacccactgctggcccaaatttgctgttcagcaaggccaaacagtgggcaattcttcactgtaaccctcactacagtcaccacgtcattcctgtggaacactatgaggcctggggcaggggtggggtggaggcagagacaaggaggaaactggagccaactccacctaaagaaggtgaggcaggaaggacccaggtagagaacctctacgtggttctttttgctggagcaaagtttaaaaatttgtgaggacctcacatcagaaagttgtacccacattctagaaaaatatcccccacttaagaaaccagttgcatcctacaaccaactcattagaaatcaatgtctagggtaatacaataaagttttcatagttctgagctgaaaacaaatctatcaaaccatgacctcaagcaacttgagatctgcagaaataagaggcctaggtgtaaaaatatttggagaatgactagaggttaaattgtaaaactgatagttcacataaatgaaaacttgtgggctgagacaaaacaatatgattgtattgaagattaaaattttacccaggcctaaaggtcgagtaggaggaaaggtggagggagggtttcctagaaagggaaaggaagaaaagtaccatataaaataagatatggaagtgggaaacagcaaaaggaaaaaagcctgtgtaggtctatgcatggaacagaaacaaaattcccttctcttttagagcattgttttctttttttctttttttgtaagattacacagtaggccgggcgcagtggctcacgcctataatcccagcactttgggaggccaaggcaggcgtatcatttgaggtcaggagttcgagaccagcctggccaacatggtgaaaccccatctctactaaaaatacaaaaattagccgggcgtagtggcgggtgcctgaaatcccagctacttgggaggctgaggcaggagaatcgcttgaacccagaagacagaggttgcagtgagccaagaccacaccattgcactccagcctgggcaacaagagtgaaactctgtctcaaaacaacaacaacaacaacaacaacaacaaaaaaaaagattacacagtaatttattgagagcctcctctccctgccttgcagttgcttggagattttgtacgctagccccaggaaggtggctgggggcagtggtgcaacacactgctcaatgagacccataaggtggctgtaaccatcttccacataccaagaacatggtcagcagatccagctcctcatatagtgcctcctccctgtaattcttctgcatgatctggtgctgttccggtgtggcccattgcagacactgaaccaccagtcagctgcatttgttgtcatctgttgtcctggatgtcagtacaaactctgccagtggtgacagtagggtccccaaagaggtcaaggtaatcatcctgaatctgaaagaactcctaactccagcaggatcttcctgtcattggcccattccttccccacactgacgcctgccatagacatggctgcagcttcaggatggtagaagaagtagaaagctgtcttatacttgacagtgatttgtacctcttttcagtgaaccagtcaagatccacattgctctggggggctgtgatggggtccagggtctgcctgatctctgtctaataggaactccacaggaagtgctttttcaggttcaggtaatggggttgctctcagcaacagagcttcaacaggtgatagatagatgcttctagaagcatagcatcattgatggcatccaaacctacacctggcttctgatacaagcagatctgcccccagcaaggtgagggatgaatccctgatgtcatctgccaccaggaagaaagcttgcagcacaaggtgcagtggctcacacctgtaatcccagcactttgggaggccaaggcagggggattacctgaggtcaggagttcgaggccagcctggccaacatggcgaaaccccgtctccaccaaaaatacaaaacttagctgggtgcggtggaatgcgcctgtagtcctggctactcagggggctgaggcacaagaattacttgaacccaggaggtggaagttgcaatgagctgagattgtgccactgcactccatcctgggcggcagagctaggctccatctcaaaaaacaaacaacaacaacaacaaaaaaaaacgggcaagcttacagcagttcacacaacagcccagacaggacctgctggagactatcagcatcctgtttcctgggctctgccagctcctggaatgctaccagcatcatcaaaccctagtggtacttgtctccagtggcagtgtactccaggacctctttgagccaggtaatagactctcctgtctctgggtgccccatctcatcctcagtcagcatcctgacaacctgggagaagtcctggataaaattctgcttttcttgggcatacatatctggatttctggtctccattcattttgttcctggatgtgagttcctgcttggacagcatttttcaaattaaattttacatttagtttgtgatttctttcaagccctaccacaactcgcattagtcaaaaccagttataggccgggcgcggtggctcatgcctgtaatccccgcactttgggaggccgaggccggtggatcacgaggtcaggagattgagaccatcctggctaacacagtgaaaccccgtctctactaaaaatacaaaaaattagccgggcgcggtggtgggtgcctgtagtcccagctgctcggggggctgaggcaggagaatggcgtgaacccgggaagcggagcttgcagtgagccgagatcgcgccactgcactctagcctgggtgacagagtgaaactgtctcaaaaaacaaaacaaaacaaaaaaaacaccagttattgtcccgactttacagatgaggacacagatactgtcatttggaaacactagctgactgctgaagaagagccaaccagccggtgggagagctagattttgacccatcttctgactccagaccagagccttaatcttgggctgaactcaacctactagaagtgtggactgaaggggagaggtccccttcaggaaacacgcatcaggggttattgtaggttgaagtctgccatgtggtgacaaggcccagagctgatgacagcaaaagacagcaaatctgattttttaaaagaaaagtaaaatccattataaactgtcagccaggagagcagagcagaaagagtggcctaatgcccagagactgccagaaccaaagtggtgcgcatcagtcacaaaatactgtttcaccaactatttatttggcttatttgagggaaaattcagaaatgtaatgctatgttgaccttttctttttgaaatcaaactggaagaatttcaggggaaaggaaaatcccattaaatcttcaaactaataaaacattttttaaaaaggaacttctctagagaagcttatcctagaaaaccagtgaaacagggcttttaaaaaccaattagaagtctttaaatcttcaagatccaaatacttagtgtctcccagttgtgacagtgcatgaagtacagagcattcctgctaaaaatgttttccaggaatttagtgaggtctttagacctgacttgcagttaccaggaatatgagaaatatagaagttaaatgaaaacaaacaaacaaaaatcatacaaatcataaaggtagagtatcttacaggacaactgacctctctgataaagcagtggcaggggttgggggcggtaggcgctattccagattaaaacgtaataatcaaatgcaaatgtatggaccttgagtggatccttgttggaaaaaatcattagtaaaagacatttgagacacctgaggaaatgtgaatatatattaggtattagatgatatgaaggaatgaatagctaattttactaagggtggtgtaaatcattaagaaaaacgctttttagggtgacatttcacctctaaatacatgtctctgatttactatcagtaaacgaataaactacgccaatatggcagaatgttagttttcaatctaggtggtaagtatataggtgtctattatataattttgactacttttatgtttgaaggttttacataataaaaaattaaagtttacaaatacatgagactaacagtgaatattagttttttcggtattactattctacccaaccactccttttctagtttatatgaagctttattaataaactaaaacttcaagcactagtaaaactaacaactggttattattttggtagaagcaacaacaacattcttggggggaaaagtctttaaataaaggctctgtctaatcaaaggagctacaggtaggaagaccatagatcccaagaacatttagataagaaaccttttcaaaaatctgcatcataagaaaaaagacagagacctgttactatagaaacgatttgcagggcttgaacatttccagggaaaacagcacctctagcaaggaaaggaggctgaagagcttcctagggccttgcctgtcagctgctggaagtcaacagagtgagcgatgacaattctgacaggcccacccatgctcagagacctcggcatgacaatttaactcctagtcctactgcctctcccttcagaacagacccagaatagtcaagtgactcacctacctaagttcataaaccagttagcatattactagcccaggctagctgttcttcccattacagcagcacaaagctttgttgacatactagttttttttttttttgagatggagtctcactctgtcgcccaggctggagtgcagtggcatgatctccgctcactgcaagctctgcctcccgggttcacaccattcacctgcctcagcctcccgagtagctgggactacaggcgcccacaaccacgcccggctaatttttttttttttttttgtatttttagtagagacagggtttcagcgtgttagccaagatggtctcgatctcctgacctggtgatctgcccacctcagcctcccaaagtgctgggattacaggcatgagccactgcacccagcctatacaactagtttaagaaataccaaggagatttcagaattagatcagtgaacagaatttccaacatgctaaatatgaagctgaaagatgtgcatctactttttataaactacttcacttataaacagccccagccctcaaaaagctgtttactgtggtggaggaggggtagaaggggagaaagagatgacaccaaaatgaaaggacacgcagcatgggataagtatggcctccgtggaggcaaagcctgacagcactaacagctggaggctgtcagcaaactgttccttgaagctgaagggcagattctttttgataggccatcagagaggcatacctccagggctgcccatgtgataaacgataaatggtggggtcaattagaggggtatgatctacagcagctatgccttaaagtcaactagtcagcgacctcactgagttaaggcctctcatctgatctccaggcacgcatagcccttcctcactgctaacgaacactgtaccacaaatgcctagaccacacaggtaaaattatattttaagctattttagtgagagattccttgtttgggatgtttgccaatggcctctattgaactgagttctgattcctgcttaggacaaataaaaactaatgtgtgatacataaaacacatcacacttcacaggaagagccatggcctcttaggactgcacatcacaaacatttggaccaactggacctcgaaaaattcacccagaattcagtcacggccaatttcctcacctaaacctggctgcttgttcacagaagtctccataagcaacagttgttgataagcaagaggcagcagccacctccccatggttgccaaccaaaaacaaaaaggacagtaaaataaattacaggaggagggcagataataaaggccaaacattgcaaaagaacaaacctcaggatcttcacctgggtctccagctccagcaaggaaatgagacagagtggtttctcagattaactgtgcactaaactatgcactaaactaaaatactaaattgccctatatgaggaaatgcgatggaagataagaaaaaaatgccaaaaaatgtagcaagaggctacaacagaacaaaacctcacagcaatggtgaggaaagacaacagaaaatcaatcaagtgttttttgcaaggaaaaaacttattcaattttagaaaaatcactttggcatgaatggatcagagcaggacaagctaggaggcaagaaggccagttaagaggttattgtaatttaagtgaaagatgactcagattctagaaatattcaggtggtatatgtgtcagaactttgtgagcatgattagccaaggggattcacgagaaagaataattgcagataaaacaaataaccaggccgggagcggtggcttacgcctgtaatcccagcactttgggaggccgaggtgggcggatcacctgaggtcaggagttcgagaccagcctgacccacacggagaaaccccatctctattaaaaacacaaaattagccaggcttggtggcgcatgcctataatcccagctacttgggaaggctgaggcaggagaatcgcttgaacctgggaggtggaggttgcggtgagacgagatcgcgccattgcactccagcctgggcaacaagagcaaaactccatctcaaaaaataaataaataaccaggttacaaagactagatgaagtagcaacatgtgtcaggttaaaattcattacaagggttgactatggccagaatgaactttaaagacatcagataaaggagctggccctaatgccattaatattgatcttttaaaagtttaaaataaatctaattgccttgaaaactccatttaattttaactctggtacaggtaactatgaatgttagtgtatgccttttattgaaaaacacttagaccataatctctaaaccagcatggacacgttctgcaaaaaacaaacaacccaaaaaaactcaaaatgaatttccttctaggttcaactcaaaagctactttctccataacatctggactttcctgtctctccaccagaagcacccagcttccctctgactacacagaacccctttactccttgaaggccaagatcaggccaacaatcatctttgtttcccctttaacagtgactactcatagagaccatctacagttccacttttcacagtttcagttacccttggtcaaacatggtctgaaaatactaaatgaaaaactccagaaatagacaattcataaggtttttttgtttgttttctttttgagacagagtcccactctgtcatccaggttggagtgtagtggcacaatctcggctcactgcaaccttcggctcccaagttcaagcaattctcctgcctcagcctccctagcagctgggattacaggtgtgcaccaccatgcccagcaaatttttttgtatttttagtagagatgggggtttcaccatgttggccagcctggtctcgaactcctgacctcaaatgatacgccctccttggcctcccaaggtgctgggattacaggcatgagccatcatgcctggcatttttttttttttttttttttttaaacagagtctccctctgtcacccaggctggaatgcagtggtgcaatcccagttcactgcaacctccgcctcccgggttcaagtgattctcgtgcctcagcctcccgagtacctgggattacaggcacatgccactatgcctgcttaatttttgtacattttgtagaaatgaggtttggccatgttggtcaggctggtctctaactcctgagctcaagtcagtgacctgcctcggccacccaaagtgctggaactgcaggcatgagccatcgcatccagccaacaattcataagttttaaaatgcacgctattctgagtattgcgatgaaatctccagcccttctgcccagaatatgaatcaatcctttgtccagagcatccacattgtctatgcttcctacctaatagtcacttagtatccatctcagtgatcaaatcaaccttcagttttgcagtgtttgttttcaagtaacccttattttacttaacaatggccctaaaccacaagagtagtgacgttggcaattcagttatgccaaagagaagctgtgtttccttcaagtgaaaaagattaaagttctcagtttattaatgaacaaaatcattacgctgaggttgctaaaactatattaagaacaaatcttctatctgtgaaactgtgaaggaggaaaaaaaaattcatgctagtattgttattgtacttcagactgcaaaagctatggccacagcacatggtaagtgcttagttaagatggaaaaggcatgaaatttgtgggtagaagacacaaacagaaatttattctgaatgatggcaatccagtttggtactaccctcagtttcaggcacccactgggggtcttggaacagatccccaaggataaggggaactactgtatcttcaattctaaggttttcttgaaataaggaaattaaaatataatatgtgttgagaatatacaacattgtacagaatgaattactgatgtggtggctcacgcctgtaatcccaacactttgggaggcagaaacgggcggatcatctgaggtcaggagttcaagaacagcctggccaacacggtgaaacccagtctctactaaaaatacaaaaattagccaggcatggtggtgggcacctgtaatcccagctactcaggaggctgaggcaggagaattgcttgaacccaggggacagaggttgcagtgagccaagatcacaccacttcactccagcctgggcggaagagcaagactctatctcaaaaaataaaaataaaaataaaatagatgtttttaatgtggatgaaccttgaagacattttgcaaagtaaaataagccagacatgaaggacaaacattgtatgtttccggccgggtgcggtggctcatgcctgtaatcccagcactctaggaggttgagacaggccaatcacttgaggttaggacttggagaccaacctggctaacatggtgaaaccctgtctctgctaaaaatacaaaaattagccgagcatggtggtgggcacctgtaatcccagctactcgggaggccgaggcagggtaattgcttgaacctgggcggcagaggtttcagtgagctgagatcatgccaccgcactccagcctgggtgacagagcaagactctgcctccaaataaataaatatttctactaatgggctccaatagaataaaattctagtaaatgaatgtcctcttggccttgagtataacagatttaacttggttcagatactctttgcataacccaacacaaattatatcccaatctaattactatagactctagcaaatttataaccatgggaaacatatttgtttgcataacctggaactgagaattgttcacataatccaggattcataatctgggatccaatgattagacagttgccctctcctggtgagttttaacactgcagtctactcaaccaaatactagactcaaattacagtcctcatatagaaatcactggcaaatgagtcaggtggggaatgcccaggcatggaagggtttctagaggtggacaaagcaaatagcagagaaaatacaaaagcggggataggtgaggaagaagggagaaatcattcaaataaatcagtaaaatattattattaaaattaaatcacctaccagagattacaatgattctctttctatatcatcctctcagctccgccactttcaagatacagtcttgggaaagttctctctgtgccccaatttccttatgtataaaatgggaataatattgcctaccccatcgtgctactgtgaggatcaaatgaggtaacacatgtaaaaactcactgtttagcacaaagtaagccatcagcagtatttgttactcagaacatcagtcggcttaagcatcgcttcacccattcatgctcccatctcctggcattggtcaagttcctatgccaagtgctctcactgagctgtgtttttgtttatcatcacatttctcaatctcacaacacatttctatttcatgtgattctatctgctaggctgtaagttccatgaaggcaggaactatacctggttttgctcatcctgcattcccagcgttcagtgaagtgcgtagtacttgatgatcaatgaaattgtagtaaaattcctactaatttttttaataatagtatttagtactaatacaagttgaattgtgccattcgccaaaaaagatatgttgaagtcctaaaccccaggtatctttagcatgtgactttatttggaagtagggttgttgcagatgtaattagctaaactaacacaggcatactggagtaaagtggaccctgcctcatatgactgacattcttataagacaaaacaaaaacatggacactgacagaggcagcgactggagtgacgcagctcaaaccaaggaacaccatcaactgacggccaccaccagaagctgggaagaggcaaggacagcctcccccactacaggttctggagtgagtatggttctgctgaccccttgattttggaactttagtctctagaactgtgagactgtttatttctgtcatttaaaccacctagtttgcggtactgtgtgatagcagccctgggaatctagtacgagtaccaacctgaaggctttgcttgctatagtgaagttatgtatattgatttttcttcccatgtcagaaaaattgtttatagataatccatttttaaaagaaactattaggattggcttttctccccctttctcagtaacttcttaactgttttattccacttagacatgtccaaaattccaatcatataatatgtcaaaagtgccttgttattttttcttctttattcacagtgctctttctggcaatgaacacaactaagtcctatataagtgttcattaacaaaccaagcacaaaaattattaatggatcaaaatttgagtgagctacacatctaaaatagtaccttttaatgatgagaagagcatttctataatatactttaaaacttgggatataaactcacctttcacccatgatataggagagaatagtaaatagtttatgtttttgttcctcttcacatcttagaagttgttaaaattcttagttcaccacagcagtctaatttaataaatccgagaggtttgtgattcaaaaagaaaaaccttttgtgattgctacatttcagtatgaagtgtctaagatgcatttttgtataaacaaagtatctaattgcctcccattatctttagcgaatagacataatcttccagtgaaaatggctgaggtggggatatgactcactgccagtgtctgtgcttcctcagccctcacagggaagcagtcagccatctccaatgccatctcctcacgctggattatatgcatgcttcccaaaattttgaactgttaacatgatttataaaaactgtcttggcagacaagctaaaacctactttaactggaaatgtgacagagtcaagactcttgcatattcccaaaaactcataaaaaacaactgatggaacaagttatacccatttaatccttggtagataatgctgtctgaaaggctgttcccatgtatacctggaagggtcagttacaggggcatgaagatcaaggccctcagagaatagcagactctccaatttaactaagtgtaggttctgaataaaagaatagtggaaatacaggaaaggtaccttatatagaaaggagaactcaccaagataaaaccttgaatatttaagagaactaggatacagctaaactgaaatggcacagaaatagatcaagacgagctggtctgagctggtccaaggatcagcttgtgatgtagattcaaaggacagccagttcctgggagagatgatagcgtctcctccagccctccctcctagcccatgagctacagtccagtagggaatagtactaggaaacctatacaaccctgacaccaccctggtcacagatgaccacagatgctcccatggaaggtacacactggaaagtagggaaaaggtgcacaaggagacagtcatggagagacgctgcaacgtagggaaaactgaacaaattccccagaatgccaggaatttggatcaatccacacaagaggcactgggaggaaaaatggattttgaagaatgtaaaataccaacttattttaaattttacaacacttaagtcaacattactaaccaggagttaatatatagaatacagatatataaaagatataaagtcctgtatcctgtttacaagcacagaaaagtgaccttcagagaagtatgttcttatccaaaaacaatatatagtggccacttgactcatgctctctaaagaaataaaagggattgtgcagaagcgtttatggacctaaagatgtgggttcccactcactcctatctcccaccagtatccttccttctccctgccatccaggttggtccaagaccccaccacatttcaggttcattcctttaagttcagcatcatccttgttctcactactctgtcttctctttaattatatatctctttaaaaaaaaaaaagaaatattaaatccttaaacagatcccctagatacaggctttcaaacttttgactacaacctacagtaagaaatgcattttacatctggagccagtgcacacacacacaattatgcctataaaacctacatagaagtttctcggccgggagcggtggctcacgcctgtaatcccagcactttgggaggccgaggcgggcggatcacaaagtcaggagatcaagaccatcctggctaacacggtgaaaccccatctctactaaaaaaatacaaaaaaaaaaaattagccgggtgtggtagcgggcgcctgtaatcccagctactcaggaggctgaggcaggagaatggtgtgaaccgggagaccgagcttgcagtgagcccagatcgcgccactgcactccagcctgggctacagagtgagacttcatctcaaaaaaaaaaaaaacaaaagaagaagtttctcaaaacacttgtccttactatatgtgatagactgatcttatccattctactccactttttgttttttttttttttttttgagatggagtcttgctctgtcgccaggctggagtgcagtggcacaatctcggctcactgcaacctccgcctcccgggttcaagtgattctcctgcctcagcctcccaagtagctgggactacaggcacgcaccaccacacccagctaatttttgtatttttagtagagacggggttcttgatctcttgacctcgttatttgcccacctcagcctcccaaagtgctgggattacagacttgagcccccgtgcccaacctctactcactttttttttctgagactgagtttcgctcttgttgcccaggctggagtgcaatggtgcaatcttggctcactgcaatttccgcctcctgggttcaagcaattctcctgcttcagcctcccaagtagctgggattacaggcatgcaccaccacacctggctaatttttgtatttttagtagagaaggggtttctccatgttagtcaggttggtctcgaactcccaacctcaggtgatccacccgcctcggcctcccaaagtgctgggattacaggcgtgagccaccgcgcccggctactccacttttttttttaatgctgttgacccaattcacagtttgaaatatacagatagggtacactgattcagttctctctgtagcagtataaggaagtggctaagaattctgcagtcagactctctggattcaaataccagctctactacttgtgtcaacctctctgcctcagttgccttgtcatggggataagagaaatgtttacttgaaaactggaagatgaaccaagaccatccaacgtaaagcttttaacccattaaaaagtacggtcatgcattgcttaacaatggggatacattctgagaaacacctgagaaatgcagtttcatatcgcaaacactgaaggaagagagtgctaacacaaacctagatgagatagcctattacacacctaggctacacggtagagcctattattcctaggctacaaacctgtatggcatgttactgtaatgaatgctgcaggcaactgtaacacaatggtatttgtgtatttaaagatatgtaggccaggtgggatagctcatgcctgtaatcccagcactttgggagaccaagaggagaggatcacttgagcccaggagttcgagaccagcctgggcaaaacagtgagaccctgcctctatatttaaaatacaaataataataattttagaaagacatctaaacatagaaaaggtacagtaaaaatatagtagaaaagacttaagatggtatgtctgtgtagggcacttaccatgaaaggagcttgcaggattggaagttgctctgggtgagtcagtgaatgcatggtaagtgaatgtgaaggcctaggacattactgtacactactgtaaactttataaacactgtacacttgggctacactaaacatattttttcttcaataatttcagcttaatgtatttaaaactttgactcttttgtaataacacagcttaaaacaaaaacacattgtacagctgtgcaaaaatattttatatccttgttctatacctttttctatttttaattttaatttttatttttatttatttatttactgttgagacggagtctcactctgtcaaccaggctgcagtgcattggtgcaatctcggctcactgcaacctccaccttctgggttcaagtgattctcctgcctcagccttccaagtagctgtgactacaggtatgcgccaccacatctggctaatttttacatgtttagtagagatggggtttcaacatgttggccaggctggtctctttctaactcctaacctcaagtaatccgcccaccttggcctcccaaagtgctgggattacaggtgtgagccaccatgcctggcccaattttcttaatttttaaattttgttaaaaactaagacatgggggagacgagaggaaaaaactaagacacaaacaaacacattactctaggcctacacaggtcaggatcaccaagacatcaccagacaatgtgaatttttcagctccattgtaatcttataaaccaccttcatacatgtggtccatcattgaaggaaacatcataatgtaatgcatgattatattcaattaatggcttataataatcttaaatgggctgggtatggtggctcacacctgtaatcctagcactctgggaagccaaggcaggcagatcccttgagctcaggagttcaagaccagcccgggcaacatggcaaaaacccgtctctatcaaaaatacaaaaattagcagggcatggtggcacaagcctgtagttccagctattcaggaggctgaggtgggatcacttgagtccagcagagtgagactgcagtgagccgagattgcgccactgcactccagcctaggcagcagagccaaaccctgtctcaaaaacatgaaaataaacataataataataatcttaaatggtccgctccatggacttttcttttctgaaacagggtctccccacgttgcccaggctgttctcctgagcaacaactatcctcctgcctcagcctccctagtagctgggactgcaggcacgccacaaaacctgtctttatattgtggtaaaatatatataaaattggtcatttttagccatcttgaagttacaatccagtggcattcacaatattgtgcaactatcaccactctctagttccagaacattttcatgactccaaaaggaagctccaaaggaagctccatactcattaaacaatcactacccatccccctcttctcgccagtccctgacaactactaatcttgcagtgtctctacatccatggactttttttttttttgaaatggagtttagttcttgttgcccaggctggagtgtaatggtgcgatctcggctcactgcaacctccgcctccagggttcaaatgattctcctacctcagcttcctgagtagctgggattacaggcacctgacaccatgcccggctaatttttgtatttttggtagagaatgggttttcccatgttggccaggctggtctcgaactcctgacctcaggtgatccgcccgcctcggcctcccaaagtgctgggattacaggtgtgagccaccgcgcccggcccatggactttttaaatagtaaaacttgaccagaacagtttttttgttttttttgttttttctggagacagagtctccctctgtcgtccaggctggagtgcagtggtgcaatctcggctcactgcaacctcctcctcctgggttcaagtgattctcctgcctcagcctcccgagtagctgggactacaggcgcccgccatcacacccggctaatttttttgtatctttagtagagacggggtttcgccatgttgaccgggctggtcttgaactcctgacctcaggtgatccgcccacctcggcctcccaaagtgctgggattacaggcgtgagcaccgagctcggccaaccagaacagttttctaatgtggaatgatgtgttctttgcagttattaatcctctttaaatgaatcttcgctcatgagatatttcagctaaccatttctcaagtaaatctgtgagtcactttagataattctgtgacctgtctcagggtcagaaattcctctctctttgggtaattagatccatgctagattacagaacactgtcctatgaattctctttaagggaggattcccaaagcctggccgatgctgtgaagtaaaccactttctgtgtctgcaaggggcaaaatgagtaaggccttaagaagacatttcattacattgtgaaatatctcacacacacacacacacacacacacacacacacacacacacacaaatttaaagccctagacctccaaagagctgatcccacagaaaactgaaagtttatttttcagtctttgtattttgaaatctcttctgagattccaaacttttgcaattgaggggtaaaaaaaagtgaatttggaaacagaactagaagtcactgccggttttagagtgtagcatcatttccttttggggccccgtctctttcacattctgatttcccacccttcctttggggtgtggaagactgggcaaaaaataactttctttttcccagggtctatttggtggaatcgctctacactccttcagagaaataactggggcagggagattgcctttccagcgcactgtttttctttcaaaaaacagtgaacggtagaatgcttcttagggcaaataaataaatgtcaccaagacacacggaaggtgtagactggaaaataatgtctttggtcccagctgtagaagccagaagctttatttttttaaacacagaccaatactgcttctctggccaacaggcagcaaagtccccattttccactctccatcaccccatcttgcatcctacccacactgattgcatccccaccctctgggtgaaaagccgacacgcctcagacgctaacagcaccgggtcaacccggctttattttagggtgggagggtgcggggatgagactgagtcctggaacccacggagccctccgaatcccggagtagctttactgctttttgcggggttgggggtggggggaggaaacagatttcagcagcaaactcacccaatcaacctcacacctcaaactccggggaagcccgtgcccaaaattgtgccgaattttgtaaatgtcctgaactggagtaaacttgaggtggacaaaaaaaaaagcacaactctaagactccgatcccctggcaaatcagtgggaatgcaggtccccgaggtttcggggaaggatcgcgccgaggcttcaatccagatacacaccctgacaatgggatctcaataaggaactacccaggaagccgtcgccgcagcaagtgcccaggtgatccttatcgtgggcaagtttggaaccgcaggtaccccgagaatcccgcgctgggcgctcaggcgagagggctccgggctcccgtccacgcccacccggggcgttctaggagggctgcgcgctgggagcgggaagggcccctggaaggcggctgcagcgagttccggggctgagaggtcgctgccacccaggaagccccgactgtgccccacgcagggcctcggcagggcggcaggctagggcgggttcggaggtgacagcgcccggcttcctgcgccaaaagtgaggcaactccggaaacttcctggagccggcgcgcgtttcctgcaagcaccgcccccgccgcccgcacgctctagcagcccgcgggcgcactgacctgagatggtctcctggtagcccttggtgaagaactgcatggccgaggccgccctccagggcgtcttgagcagcccttgccgctgggggttctcgcccagcgagctcaggatggacgagtaggcggctgccaggttagggaggttcagctcgttatcctcctcgctgcggggccgctcgcccttccagccgtccgcgggctgcgcgctcttggcctcgggccgcgggggcttctccgccggcctgctgggcccgggccgcggcggatcccgctcggggaacccattgctgcacctggcgccccgcggcttctccgccggtgcccgcacagggcccttctccatggacccgccgcagccgctgccgttcgggaaggaccccggggcgcttcgaggtctgcggctaaactccgccggtggccgcggacaatgggctgtggccggagtcacctgaggaaggtacgcaacctgcttagatcacactccgagccgggagcggccacaggctggaaagcccggccgcgcctcctttttatggcccggcggctcagcctgcgccgcggagcgctcccattggccggccccgcctcgcgtcacggccctcgccgcgcccctcggcctcccgcccccggggtccccagcaggggtcgcggctccggagacgcccggaggggttcgcaagcgcagggagggaaggaaaagggcgccggcccctaggatcaggcgggacccctccacttattgcggaatgagccgaacccgaaaagaggcagtcgtccaggagctgggatctcagtgagaaagacgcggtctgggcgcccagtcgccccctcttcaggccaagagggcgctgcattgaagggctccggtcccctcgccctgtgaaagatcagcaaacaggtggccttgcctggagagagaccgagttaagccaccgattaggaaccaactcttaagctttcaaggcaagagaataatgtgacttcagactcttgggtttagttaaaaacgcacctgccacctaggggccaggtggcaccgctgtcggggcaagtgtcacatcaagtggcccttatgtgggtccctatgtctagaaggataggatttatggttgctagaactttgatcctggaaaaattgatttgcaaacgaagataggactttcacttaaaatccatttccgtcggtggctcacgcctgtactcccggcgcttggggagaccgaggcgggaggatcgcttgaggccaagagttcgagaccagcctggaaaacatagcaagacctcatctctataaaacccatcgcattttctagaaacgcagttgtgcagatttggtgctcaattgttttacagttccatgcaaagcgtctttccccagatgttggtacaaattgtgaaatgctattcaccaactgaactcttaaccagtgacatctgctgtaactgttttctttgagattaataaatggacctttttcctcacttgagggattatctcataatgccgaaggtgagctttaaaacatgtatcaaaataatattttttttctttttttttttttgaggctcacttcatcctccgcctcctgggttcaaacgattctcctgcctcagcctcctgagtagctgggattacaggcacctgccaccatgcccggctaaatttttgtatttttaggagaggtggggttttgccatgttggccaggctggtctcgaactcctgacctcaggtgatccacctgcctcggcctcccaaagtgctgggattacaggtgtgagccaccatgcctggcctaatgtagattttctgacatagaagcaggtattaataggcttaggatcaaacaaaccaatagggaagcctgtggaattattctatgctaacaatgtagcttggtcattataataagtaattagtatttatgatacatctgctctaggcgcagccccgttggaaacattcaggaaagaaatatggacattgcctagccttgtaggcacctttactccaaaatggaagaaatgttcatatcagtggggttatttatttatttatttatttatttatttatttatttttaaattttaatctatttatttaagagcgggttatgagactggctaatttttgtatttttggtagagataaggtttcaccatgttgccaaagctggtctcgaactccagggctcaggattataggcctgagccaccgtacccggcccagtggggtttttaaatagagaatatgaacatcctttggaaaacctctttgtcattttcctctttattaaaatttttaaattttttattgtaggtttttattgggagtggggccctgcaacatttttttcctctaactgtgctgcccactgtctgctgatacctcctggtcagaattatctgctgggtctcaagctatttcaagcatagttgaagacaacattcaaaggatgaccttgcatttaacaaatgaaaacaaagatactaagtgaggtactttaaaaatggagagagtagatagagatgctttcagtacgaatttatttttagtggcaatctttcgtcttcctttaaaaacatgtgtaaagattaactaatattgtattccacaaagacagtttctaatgaaatttttaccctaaaaattaacattttcttacacgtattgccactgaggcacctgcacctttgttgcaggacagggcctctggatacatgctaacttgtaaaatggaggcagtgcctttcggccaaatgcccaaaaataatacaagaaaactttgaaatcaccaacattatatgaataatttaatagtaaaatgtagatagttgacaaggatggttataagtagcaacaggagaaaaaaagaggaataaaccaaaagggaagtaggtcccagataatttattagcataaaatggttcaacagtaatattatgagcatttacagccaggaattgttaccgcatccatgtttttcacccagtaagggattcattttcagcttggacccagtctgggagtttctttctaccaaaaagccaaggaattttttaaagtctctaatttctaggacagcagcagaacaaagaggcagatgagaaagacacaccaagtcagagactgaacactgcagtgctacagaaatgtacaaagagttgtttgccaagtgtgatatgatgatacatgtatatgtaggttttcagccatagtacctggttcataactcacagtcttttgttacaatgttggggcactttaggcctcagaaaatagaatcaatctctctctctctctctctctctctctctctcaccttctgctccccttccactcactaaaggcaggactctaatcatctcccgcctttctgattacggatcataaaccctcattgcaaacagggtcctgcctcataccctggaggaagcatggctgcacagagaggtcaatcacaccttgacacggctgtccatgcttcaatcatgcctatacaacgaacataaaaggcccagacggcagggctcagggaggttttggacagctgaatatgtggaggttcctggagggtggtgtgcccagggagggcatggaaactccatacctcttaccccatacctcaccctatgcatcttttcatctgtatcttttgtaatatccttcataataaactggtaaacgtaagtgtttccctgagttctttgagtcactctagcaaattaattgaacccaaagagggggttgtggaaaccccaacttgaagccagtcaatcaaaagttccagaggcccagacttgtgagtggtggaaaggaggggccagtgttggggactgagccttcaacttgtgggatctacagctatctccaggtaggcagaatcagaattgaattaaataagagggaggacacctagctgatgtcccctgcttggtgtgtgggagaaaacccccacccatttggtcacagagtcttctgtgttgactgttgttgtggtataacagcagaagaaaaccacagtttcaatttgtccaaacaccaagggtaatagacaaactaacattgggtatttggcaacagtaattggaaaaaagcaaatttaagtgaacttgatggaggctctatacttgaaattcaaactctggaggagattttggatcaaggtagaaaggtacaaagaaaaggtggccgggcatggtgacccaagcccgtaatcccagcactttggaaggccaaggcaggtgaatcatttgaggtcagtagttcaagaatagcctggccaacgtgatggaaccccgtctctaataaaaaatacaaaaattagccgggcatgatggtaggcacctgtagtcccagctactcaggaggctgaggcagaagaatcatttgaatctgggaggcagaggttccagtgagccaagatcacgccactgcaccccagcctggatgacacagcgagactccatctcaaaaaaaaaaaaggcccaagagcctcatattgagtataataagccatccaaagcctaaatgtacccataaaggataccctaacagacatgtgtccctggtagagaatctgcaataccatctcagaagaacaggcagatgctaagagggatgctaatagaaagtgcacctcagcgctgctgaactctgtccctgcctccacattaccccagaagaagggatgcaacacagctcctcaagctccagactgcagcagagtcaggaaaacaaaagggcttctgttatcatggaaaaacctgaagatgtctcaacaatatcagagatacgcagtgtcaggaaacagcctcccaagcatgggcagggggcagagaaacagcatggcaaccgtgcaaacacacaccagccaaacaaaacaaaagaaaaccaagggggaacatcatatggcatgcaggagacataaaggcaaataatgcaactaagaagaaagcaaatctcatggaacagaagaaaattcctcacgaatgtttgatgccagagactaactcaataaaagtataaattcaggctgggtgcagtggctcatgcctgtaatcccagcactttgggaggttgaggcaggaagatcacctgaggtcaggagttcgagaccagcctggcaaacatggtgaaacgctgtctgtattaaaaatacaaaaattagccagcgtggtgggcacctgtaatctcagctacttgggaggctgaggcaggagaatggcttgaacttgggaggcagaggttgcagtaagctgagatcacgccactgcactccagcctgggcaacagagcgagactcagtctaaaaaaaacagacaaacaaacaaaaatcatgaatttaataagacaaaagccaaaataatagaattgaaaggggagctatggatcaacaaaataaattgaggaccatcattattatagaatcaattagaaagaaccatgtacaaagtagatactgctgaaactgtaattgctgacataaggaaagacgtgagagtgaatacagaacaaaagacaaacatgaaagctattagagaagacaaagatgatccagtgtaaggataattagggttcctgaggtaaagaactcaatgaatgtgagggaatgtaatcaaatatatcacacaagtgtattaatccttacatttatgtttgattgatttttgacaaggatgccaagacaatttaatggggaaagaagactcttttcaacaaatgatactaggacgactggatatctacatacaaaaggaagaagttgaacctctatctcacaacatatacaaaaataaactcatcgggtaggtgcagtaacagccacctgtggtcccagctatgctggaggctgaggctggagaagtcttgagcccaggagtttgaggccagccggggcaacatagcgagatcttatctctaaaaaataaaacaaaagaaaatcagaatgtaagaggtaaaattattaaactcttggaagaaaatataggcataaatcttcaagaccttgagttaggcaattggatttcttagaaatgaaaccaaaagtagcgcaacaaaaggaaaaatgtagaaaaaacctaacagccatgtcatgcggtggtaaagaaacaaccttcagtttcactgtctgggttcatggcctggctccatcaattatctttgttgtcaatgggcaagtttcttaatttctttaagcctggttcctcctctgtaaaatgagtattatatatagagtctttgtcataggcttattgtgagagtttgagagagcaacagtattagacatatacaatttgaaaaataagtattggccattattaatgacaaaaatgtctttatacaaaagcaatattttaattctagcaagttcccctagattttattgttgctacaaccagtgaaaaaagaaaaaatttaaaaatttttaaaaaggcagatcccttggggaaaaaaaaataatatttggtgctgctttacttaagagagtctaagtatagacagaaaacttgaagtgttctttttttttttttgagatggagtctcactgttgcaaaggctggccttgaactcctgggctcaagaagtgatcctcggccaggcgtggtggctcacacctgcagtcctagcactttgggaggctgaggtgggcagatcacctgagatcaggagttcaagaccagcctggccaacatggtgaaacccctaaaaataaaaaaattagctgggcatagtggcgcatgcctgtaatcccagctactggggaggctaaggcaggagactcccttgagcctgggaggcggagtttgcagtgagctgagactgtgccactgcactccagcctgggagaagagcaagactctgtctcaaaaaaaaaaaaaaagaagtgatccttccgcctcagcctgctgagtagctgggatcacaggctcgtgctaccacacccagtttaaagtgctgtttcttatcattaactgaaaattaatcaaaagttgaaataaaacatttctgttccttggttaatgaaaatagaaaaaaaattttttttaattataatgtaagtcaatagggtatagtttgtttcaagattttcagcaacagagtgatttaactgaggtaaaactgtattgtaaatactacaagtttggtgtttatttatttattttaaagaaggggtcttgctctgttgcccaggctggagtgcagtggcatgatcatggctcactgcagccttgaatgcctgggctaaacaatcttcctagctcagcctccccagtagctgggactacaggagtgagccaccatttaatattgttgctctctcaaactctcacacctaaactccaccacccaactagagtttggtttttttgttgttgttttttagagatgggggtctcactttgttgcccaggctggtctcaaactccaggcctcaacagattcttctgccttggcctcccaaaatactgggattacaggagtgagccaccgtgctgggctaatatattttttaatgtacttagtgcaacacctgatgacagaactatgaaatgatacctcaaaagatgcatttcactgaatgcaatttactattaaaagcccatatgctgagttcccaactaggcattgcgaaatgacaccattcatcaagaaggctttcaaacttatgtatgatgagaacactgggtcagggctctatcatctgaggaagggacaatctagacatggatcaatatctatctgcagagcattatctccaacacaacagtgtccgatggcagggctgtatgtctcatctgcacatttccactgctccccacttctcccgagctcctctatcggtagtagttattttgggaggaggcctagtttatccagagcagaggatttgttttctagtcagcagatgctttcaagttgtaatttaactgtcaatgaaaaataaataaaaggtgttgcaaattctgtaagatcttagcaattcatggaagctctgttgttattgaatgtatctccctctcagttgcctggggaactgcattttaatgtcacacatcaagcagctctttcctgaatgtaattgtagtttttctgatgtcatggttaaagctgttcaaatgtttggcttctggcaaatattttctaacatcattcatgacagtgatggatctgaagcaattttaatacatttttaaatctcactaacttattaaataaccagagaaagaatcgtatataaattgaaaatatattcattaccagaagaagtgtctaggaagatacatgtgagtctgtaatgatatgaggttttcatgactatgattggttcattgcaggatagcatattagaggccaggcacgatgtctcatcagggtatgccatataccaagatgaagccctataccagatggaccattggtttctacaagtcactgctagatgcctaccccaatatcatttctccccttcttttactaaaggatctccaactcagttcagagaggcctggacttagttcaatacacttggacttgactttaaaaaaacacacacgcattttcaagttccctgcagttacaatggccacatgacatagttctgtccaatgagttatcagtagaaattgctggatggcacttctgggaaaggcccttaaaagggggcagattggttgcttttctatgtctaaggaatatgataattaatattgatataatatctgtttatacccatcttgtcccatgagaaaattctgagttaatgtgcagttctgctcaggtattagattaacattttcataaggaaccctagtgacaaaaactgttgaattttaggccggtagggaggtgtttttgagcaggaaagcctgagtgcccctcagtttccaacatacaagaagtcctaggccaggcgtggtggctcatgcctgtaatcccagcactttggaaggctgaggtgggcaggccacttgagctcagaagttcgagaccagcctgggcaagatggtgaaacccagtctttacaaaaaatacaaaaaaattagccaggcatggtggcccatgcctgtagtcgcagctactgtttagccagtgaatggagctggctttggctttcatgaacaataaggtgtggggaggatgagatttggaatgagaggatgagatttggaggatgagatttgtctaattttatgcaattagacaaaggggtacattccagcacagcagtgagtaagtcctaggtcttgggaaatagcaccctgtaggtctgtatatttgcaaagttgtggagaatctaaaaggaaaattgtataaactttcctctccaaggctaactcattttctttaactcactggtttaatttgaccagtttcattccttttggctttcacacctgtccaaatctgcttgtctcacttttattatatatataatattattattttaaaaaataaaacatacttcccaactggtgagcttttatacatatgcatatataaatatgcaaaatgttcttattgatctacataggcagttgtaaattttattttatttatttatttttttgagatggagtctcgctctgtcacccaggctgaagtgcagtgacgtgatcttggctcatagcaacctctgcctcccaggttcaagccattctcctgcctcagcctcccgagtagctgggattacaggtgcatgccacgatgcctagctaattttttgtatttttagtagagatggggtttcaccatgttagccaggctggtctggaactcctgacctcaagtgatctgcccgcctcagcctcccaaagtgcagggattacggggtgagctaccacacctggctgtaaattttaataaatgggtttggaagatacagtttaattagaagattaatgagaccttccagaatgttaacacaataggagcgtgtgtttgaacagtacacgccaaacttcagtcattcaagtaccatctggttctctgattgtgcctatttctgaggatattttaaaagctccaggatgtaccccatacaaccaaaaacttggagggaagaacagcaatgttcccagccttgtatgttgtaatcaccaaccttaaatacattccaactatgaaagagaacaggcctttttgtggccaggctggggaatggcatccaactgatcatagatcagatggaaatcaagaaatgatcagaaagcaaagaaactcaaccctcaccccattgtcccctcatcacacttcctcaagccaagtgagaaagacacagctaagtgttgggctaatcctgtccttacatggaaatctgagcagtggcagagagtgagaggaaacggagcctttgtaaagagactcggaaagtcactggttctgattttggcaaaggtgcagaagtaaaacaatttggcatttatacaggcctgcgtggaaccctagtttagtcacttattagaagctatgtaaccttggacagatcccttaactactctgtacatcatttttgtcctctagaaaataagctatctgctgagtgcagtggctcatgcctgtaatcccagcactttgggaggctgaggcgggaggatcacttgaactcaggagttcaagaccagcctgggcaacatagcgagacccctgtctctgctaaaaataaaattaaaaaaaatttagccaggcatggtggcagctgccatgagctgtgatcgtgccactgcactccagcctgggcaacatagcgagacccctgtctctgctaaaaataaaattaaaaaaaatttagccaggcatggtggcagctgccatgagctgtgatcctgccactgcactccagcctgggtgacagagtgagaccctgtctcaaaaaggaaggaagcaaggaaggaagggagggagggaggcaggccgccaggcactgtggctcacacctgtaatcccagcactttgggaggccaaggtgggaggatcacttgaggtcaggagttcaagaccagcctggccaacatggtgaaaccttgtctctattctccactaaaaatacaacaattagctgggtgtggtggcacacacctgttaatcccagctacacaggagactgaggcaggagaattgcttgaacctgggaggcagaggttgcagtgagccaagatcgcgccactgcactccagtccgagtgacagagtgagactccaccttgaaaaagaaaaagaaaaatgggactaataatacaataataccatccttgcaaagttgttaaagtgatttctaaaaatacaatgtatattacatgattccatttatataaatttcacagacactttgggaagccaaggcaagaggattgcttgagtccagaagttcaagaccagcctgggcaatatagtgagaccccatctctataaaaaatttaaaaataaataaataaatagtcaaaaacagggaaatcagtctgtgatattgcaagttaggatagtacctatctttgaggggaggggagggtcttgcttgggagaggcaccttgtgaacttctgaggtatgggcagggacttggaagaaagggatacggggcttcactttgtgatagttcgctgagatttacatttatgttgtgggcacttttctgtatataaatatacttgaattttgttgaagttgaaagaaataacacatataatggcttagcactgtgcccaacatattctaggtgcttggtgaatgacacttgttatttgtcattcattctagatgccaaagcctgttggaagatgtgtaattgagaaatcagtaagaatgaaatccaattttaaaatttccaatagtttgtgtttctataacatgtcattgacatcccatgtggaaatttgagaagtattattagagaggggtgtaactggaagctgtgaaaattcacatctgagggcacagagaacaggctccattttgctgttatgtagacttcctagttcctgtgtcccattggagatgctctgaaacctttttctctagtctgtgatccacccaccatttaggtctgcatgtgtccattttaaattaaaattgagttcccactatgtaattttcccactgaaaagctggggcacgcaaaaccctgttgatctcatcaaatcctgattagtggccctgtttcttgaaaatcatggaagaaggcatttacaatgaaatcctcattttcatttttttttattgtctcagcttttttttttttttttttttttttttttgagatggagtcttgctctgttgccaaggctggagtgcagtggtgtatctcggctcactgcaacctccgcctcccaggttcaagcgattctcctgcctcagcctcccaagcacctgggactacagacatgcgccaccacgcccagctagtttttgtatttttagcagagacagggtttcaccatattggccaggctggtctcgaactccttacttcgtgatccacccgcctccgcctcccaaagtgctggaat

SEQ ID NO: 39 - DNA, 59508 bp, Mus musculus
tatcacacaccccaccacacacacaccccccattctaaggccccaatccttgctgagggttttaaaggtagacttcattcttgttgattctaagtttacacactttttaaaaaaacagtatatcaatttataagtttcccatcatgcaccccagtcccactcgtttccctgtccctccatatccaccctctgtccttgcaacctctcccccgaaagaaaataaaaagcaaaacaaacagacaaataaacaaaagcaaggcatagaggacgccacctggaagctgtaccatgccacagtgtgtgccacagtgaacccctctgtccacacagcttctttttataaaaactattttgaattacatgtataagtgtgtgtctgtgtttggatatccgcacacgggtgctggttcccatgaggccagagccactggattcccacggggctgaagtaagggtgcttgggactgtctaactcgggcgtaggagttgaattttattcctttgtaaggtgagtactcactcttaactgctggactatccctcaagccttgggttttatttctttcaatacaatcaatattgtatatgtcataaaaatgcaaagcctgcttttgatactgtaggagataccacaaggagaaagaggactctaagcgggttccttagagtcagagagttagaggaaggtcatgagattgcttgggtgtcagttattcatctgtgagaaaacatgtcaagcacctcaatggagaaggcttcctcctagctcctggttccaggggtaaggcccaccatgatgggggagacacggctgacagctcttaggcagcagaagtatgaggtaacttgctcacatatcagtggatttagaagcagactgtcctgctagaaccagagggtacctcattctacatgggagccaaagctgcctctgtgcagaggctacatggggagtgtgtatgtgtgtatgtgtctgtctgcgtgtatgtgtgtgtgtgtgagtatgtgtgagtgtgtatatacatatgtgtatatatatatgtatgtgtgtatgtatatatatgtgtgtgtgtgtgcgtgtgtgtgtgtgtgtgtgtgtgtgtgtgtgtgtgtgtgtagtgggggttataggaagtgaagctgaaaggaagagggctcagaagcagatagtacaaggctgtgcacagtccgggctgcctaggctcaacatctattccaggcctcagaacagccgacacaacaagtgtgtgattctgacctctggctggacagcaaccagggtcacagacacgttctgacagtccagaggctcaccttccagagatctctgcaatggttgcagacactcctagaacaaccagccctcaggcacatacatgtgcaaggcccacaagccacaggttcagctcttcacctaaaccagccgacagagatggcattggtgggccaccagcacaatcagtcccaccatctcctcaacttaggtccactatcttttcaggatggccttgtaacagcagcaacaagtgctcaatgaggggcatgcagcgtgtgtgtgtgtgtgtgtgtgtgtgtgtgtgtgcgcacacatgtacacacgcacgcagaagcagcacttagaccctgtaggcggccaacactccctcccgcaccctgggttgctgtgtggaacagcaacagtaagccaggcaacctcccaagctgggtcgttgaaatcctggctacaagacacaggttcaggattctccttcccaagagcccctgcaggaagccagaaatgattaccatttcagaaataaaatacttagtcttcttttaggattctttttgaaaaattgaattaggcatttgagcagtccttcacattccaggaacaagatggctataaacaaatacatatcacactggcattggaagacagtatgtgctatgtagttagaatacagagaaactgttatggctttggattgatatgtacttggtcaggagtctccttcatgggttaagcttttccacagatatgaaagggcagaactttcaaagagccaagagagagttgaagaagctttgggattttaaagtaacatagcagagacgaaaggctcatttgagttaacatagcattcttctttgatgagagacacatctttggtaagcaaaatatcatttgggaattagaaactacagggttctcagggctgaggcaggctgggggtgtagtgcgatgcttatactcgtaagacatctctgcagcatgaatggtttcttgattttaaatagaaacagtatgtttacaaactttagcataatgtcaaatgtatagtgtttctctacaacgtgagttgctttgtgaattgaaagggattgagtaaaggaactgctagcctctatgtgctcttgaacccagtggtgacacatgaacctcttactagtctgctgacattcatatctgtttgtctccagaggagtcatgccaagatttccaaggttctataaggtctgtctctactatgcattagtcgatgattcccgatacatcaggggtagctgaaggttttctcacactgtttttatttatagggcgaaagctggtgtgagttttcatggtgtttgtttgtttgtttgtttgtttgtttgtttgtttttcgagacagggtttctctgtgtagccctggctttcctggaactcactttgtagaccaggctggcctcgaactcagaaatccgcctgcctctgcctcccaagtgctaggattaaaggcatgcgccaccacgcccggctgaagttttatgtttttgatggagctggatcacctaaaggccttatcacatttattttattcattctattacatcatcgtattcctgatacttacacgggacacatgtgcagagagaacatgtgtgtcataagggccgcttctccacagacatggcagtcacagagtttattccagggtgaaatttctggttcataacaaagtcattacactttccttactacctgcatagtgaaggaaagggcaggcccaccacggactcaataattgttttatgtttctgaagtaataggaacccttgaaggaggatgtccagggctattgttcttgaggccttgggatctctctgtctttctgctccgtagccctgagcttgagctcatggtcttcagaatacaggaaggctgatgtacttctagtttagcctttgcactgctgtctatagaaaggctgatgtaatgggatttacccactgaatgttatctcctctaaagaccttcgtcagaagtaccatctggcaacggtaataacttgttgaataaattatgcacacggccaccatagctgttaagaatgtgaaaaatatgtggtttgttactgttggtggtgtttgttttcttagtcaagtctaggaacaagacttctttaagaaaaactggagatcttttagttaaaacaaacaaacaaacaaacccacagaaaactattcgattgggcatctggcactgacttccacaaagcagagttctcattggttcacagcttggtctcagtgctcagcatcccctaatgagccacggagatgcttttctgcaaaagctattggattatcacagatttatacggatcttctgtagtccatctggcaataaagatattgtcaatttatataagtttcctcctctgctgattcaacaagttagtgggatttagaaaaaaaaaaagtattaaatttacttcggatccatcatctgtcatgagtgatgccaaaaaatagttagcagaagccaaacatttgaacagctttaaacaaggcatcagatagactacaattatattcagggaagaactgcttgatgcatgacattaaaatgcagttccccaggcaactggggggaagattcactcaatagcaagagagcttccaagaatcgctaaaaattctgcggcacctttttatttatttattttattgacagttaaattaccatttgagagcatttgttgactagaaaacaaatcttcctttctgggtaaaccagagcttctccacaaacagccactgtctaattgacagaccatgaggaagctagagggactatgcagactggatgtgtgtggcttcgctgtcacacggtggccacagataggtgtccatcctactgagacgtcaaagtacttctgctggaacaagcaaatggtttggattatgtctcttctttgctggtgattggccttcggattcggagtggagcccgtgagtcttccttccattaacctagtgctttcatttgctctcaatttctcccccaaagttgctccattccttttcagaagagaagacagcttcagctggattcttcctgtattgacggattagcagtgtttgaggattctcttgactccacggtcattgcttctggtgtcagggttgaaataaggacacctttcccgtgtttaccttaggatttctagtgctgtgacgaaatgccgcgatcaaaaacaatgtgggggaggaaagggtttatctcacctcacagcttgtagcccgttatccacactgagggaactcaaggcaggaacgtggaggcaggaactgaagcagagggtgtgggagagatgctgcttattggtgtgatcctcatgactggctcaacctgttctcttacaggactcaggactacttgccagcactacccacatgggctctcatgcattaatcctaaatcaagaaaatgcaccgcaggccaatctgatgggacattttctcccttgaggttcctctgccccaaatgactctagcttgtgttgaattaacataaaactagcgtgtggctctttccaccacgagccagagtctcccccagagcttgactttcaaatatagaaccttcatcaagttcacctgaagacatttctaatcagtgttgctaaatttctgaggccacttcacctgttgcccttggcaactgactaggttgtctcccctagtctggtcagcctccgacaccaagtacctctgttatctccctctttttctggcacatgccctagaaatgataggattggaaaaggtccttggacttttggaagaaagaagttgctagattgggtctgctactgggcctctaattggggtagaaatatggcgtcgttacaattcctttatgtaaatacttccaggtgggcactgggttgtctttgttaatgaattctgcagggcacgcctttctggtttagtctatgcttcccttttctctcatcactacttaaaggcaaccctgccgatggtttacgttctgctagtaaactgtttacagaatgttggtgatttcaaagcttccttctttggattgccttggggcggtggcaggacagccctgctgttaccaaatagtgcttcgcctgtctcattgtaggtgatagaatgcctcggttgtagaagcagaattcttacgagggtatagctgacctgctcaaacagctatcggtgggtcagcctatctcccaaggtagcccatctgagtaggtcggaacatctaaagaggaagaaatggcaggcttaggcatagccccaacctccaaacctcctataaaaactccaagtgtcccccacccctttcacagacacctctttcctgtgggagagtgtctgtccttcactgtttgaaataaatagtccagtctgttgacatcagcctccagcgtcttttctgcctcctgcgtctttaagctgcttgggaaatctaaccgtatgccattcactgaaatgaccagttttacaaaggagagtttatacaggaggtgtcaaatgtgagtaggtggagcctaaggcctcaaatccacctccctgaggactggggtgcctagtggactgagctgtggggtacagtaggaggttagtatgtctgcaatgactggtgctctacatacaaaatcaaactgcatggttcttcatagaattcatgttcagaaagagtggcatcagtgccctcagagggcatacatttagggcctctggcatcagaggccatctgctagccatgggcaggtgacatattggtggctttaaccactctgaaaaatctaaccatggctgttttgagctagccatcacacgttttatgaatcagactttgcactgctctgagaaaaataatggaaaggacaagggaaagggggaaagaatgatgttgctcgtgcttttaggaggttcagtctgtgaatgaaagttcctgggaagaactgccccttacactgagccttctgcaagcctgactggggggaacttgttccaagtccagagccaagttatcctgtgccatctatttgtccctcttaacagacatttatttcccttctttgtcagtggcctaacctctctgtgactattaggcatatgctctgcagcattcaacgatgtcattaattcctcaccaaccaaagaaataagagtgcagttagatagcatgtgcggggggatgggcaagctcccccaccttatcaagacctgcctattcagtacatctgtcaaagaattttaaaaatgggttgacttatgaccttcttagttcagtttctattaaaacttcatgaaggggctggagatggctcagtggttaagagcactggctgctcttccagaggtccctagttcagttcccagcaaccacatgatggcttacaaccatcggtaatgggatcggatgccctcttctggtgtgcctgaagacagctacagtgtacttatatacataaaataaataaataaataaataaataaataaataaataaataagtattttttaaaaaacttcatgggattgctacttcattaaatcatggtatttgaaaatacctaaatctgtgttcccaggctgtagtcactcattttggtctctagaacaaatcacctcttgttccttggaggcaagagctgttttctgtgatggacaagtccactgtctgtccaagcacccgagagtgggtgacatgtggcactcttcacttcatggctgtcaggaagcagaggaagagagagacatgggagctcctgggacaagatacagcgggacagaagacaaccccagtgacccacttcctctcagcacagcgccaccagctggggactgaacattcagcatgtgagccagtggggctattttgtattcaaaccatggcacaggttagtggctttgtactgcttaaccacctggcctttgaaagcaagagaaagcagaagtctactcgggctctctcccacccccacccccagggtttccttgcctttatttgaaattacacagcacaaattcagagactgggctgagaattggtgacatcaaaacagaaatttcattagagactctctttaaggaataagctagtagttaaagtttacttttttttttttaaagaaggaataagattactaactaaaacattctttttttttttttttaattgcaggcatctttatttatttccttcacttaaacagtatctccccagggctgagaaatcttggtgtttggtgaagtgtttgctgtgcagccatgaggacgtgagctcagatcccgaggacccatatacaaagccaagtgtgggcatacatacctgtaatcccagaagagagggagtggagacaggaggattgctggaactcatcgatcagccagattagtcaaactggggagctctaggttcagcgagagactccgtttccaaagaacaggatggagaaagaagcagctgtctgatgttgatctctgctctccatgcatgcatgcacatggctcacaggaatagaaatcaggtttgtgcgtgcacacacacagacacacacacctcccttggtatctttgtttttacttgttaaacatgtgagctatccttcaaatgttgcttccagctatgcttgatttatgtaatttgctatccgatatatatagaaattcaataattagctttttaaaaaccccactgacatgcatatttcttatgctttatttacacacatgcacatacagttttggtggtcattttttttttttgatttatgtaattcactattggatgtatataggaattcaataattagcttttaaaagacccactgacatgcatccatctttctttctttctctctttctttctctctttcttcctttctttctctctttctttctttctttctttctttctttctttctttctttctttctttctttctttcttttttttcttggtacctctctgttacagtagcaacggatttacccatttttttttaaaaaaaaggtttattttatgtatatgagaacactgtagctgtcttcagacacaccagaagaggacatcagatcccattacagatggttgtgagctgggaattgaactcaggacctctggaagagccatcagtgttcttaaccactgggccatctctcctgccccatgcatatttcttatactttacttacagatatgtgcacacattttggcagtgttcaggatggagcacagggctcaagcatgccaggcaagtgctttacatttcttctgttttgtttgtttattttgtcagggtctcatttagccaagactggactctaaatctctagatagctgaagatgaccttgaactcctgacctactgctttcacctccccagtgctgggataataggcttgcgtcaacatgtctcatttatgtgcttctgagcttagaagcctggactttttatgtgctaggaaggcactctaccaactgagctacatctcaggcccatttttttcctatttttagactgaagatgactctgagattaagcaatgctcatgtttttttcctgaatgtttacttggaatagatagatgtccaataaatatgaattacaatatacagtagtagactttattagtacaagacaatcccagggtttatcttctgcttgctctgatctcaagcttactcacacctattgataggtcagagagtcagcataagatactctcggaaacaaagaagacactaatttggttgcttgataaaatccacctttggaattatgacataatccctcccctgtgaaaaacaggtccccctcccccactctcaaagaaaataatcaaatcaaagcgtgtgttacttgcttaagagccctttcgagtcaccaagcctttaagtcccagcacttgggaggtagagggaaagaaaaaaaaaaaaaaacaacccagttgatcagtaacatttatttcagtttgtaccaacttctggagagtaaatctttgtacttaaagttggatcgacctgctatttccccacaaaatacaaatgggtttttaaatgaaaacacttttttttttcacttgctaatcaattttcccaaggtcaaagttctggctaccacaaacgttagccagtaggaggttttactgcaggcaggaagctaatcagcgtgaaaagctacaggcggtggtaaactctctgtcatagactagctgaaggcaagaagagggcattctcccatctaaagaagtcttaggctctgtggtggcagcacacccctttaaccccagcagttgggaggcagaggcaggcagatctctgagttccaggcctgccagatctatagagtgaatactaggactacacagaaaaaccctgtcccaacacacacacacacacacacacacacacacacaccccaacaggaagaagaaaagaagaaacatgcttgttctggaagctgaattggggggcagattatgcaggagatgggtgattgcagactggtgactgctttctcatggctgaaggtttgtggccaaaggactcacaactaattcttaattgctggtcagaagatgattttcagtcatgcaaatcttaagaacacaaatgcccatttcttcatttaatctttttgtaaaatttattttcaatttatgtgaaatggtgttttgtctgtatgtatgtctgtgtgagggttgtcggatcccctggaactggagttatagacagtttgtgggtgctgggaattgaacctgggtcctctggaagagcagacagtgctcttgaccactgagccatctctccagctcttcatctattttttttaaaaagtatttgtttgttcgtctgtttgtttatgggttattaaggcagggcttcttctttgtgtaaccttggctgtcctggaactctggagtccaggctggccttgaactcaacagagatccataggccccagattccccagtgctgggattaaaggcgtgtgcccagtttaagtatttgttttaataaacaaattctttttaaaattatgtatgtgtctgtgcgtggggttgtgcatgtgatttcaagtgcccgcagaagtcagggggattggatctcttggagctggttgtgagctgcctgaggaaggtgctgggagctgggaagagaagcaagtgctcttaactgccgagccattactctagcacccctcttgtcagtggttggtttgccaaggaccagttcttggcagagtacacactgtccggctagagggtgtagctagctgccctagtcctcttgctgatcaccaaattcagggtaatgaaagaaaacaagcttcccctagtcattgtgaaagataaggtcagagcaggttaaaacagcagagcagcgatctggcagctcacaaatattattatctccctaggcataggggactccggtgagtgccatgcaccataactcatgccttgagagaggccagagggttttctagagtggcaggtgtgtgtgttgtatacattttaaacgactgaacaattttcaagtcacaacttctccagtctttaaagcaggagagaggcagggctcatgcttttaatcccaccgtttggaagtgtgaggcaggcagatcatttgaattaaaggccttcctggtggtcgacatagagaactccaggccagacagagctgcactgtgagacttggtctcaaaaagtaaaacaaagcacaacaaaagaatgacacccagcacttgggaggcagaggcaggtggatttctgagttcgaggccaacctggtctacaaagtgagctccaggacagccagggctatacagagaaaccctgtctcgaaaaaacaaaaaaaaaaaacaaaaaaaaaaaaaacaaaaaaaagaatgactccagtagaagtataaacaaggatgggggtgagggtgtgtgggacaacgactcgtgagccctcaccctagacaaagagccacaggtgaccgaggaatgcttagactgaggtaatcttccctaggacagagaacaccaataccagattagccccgaaaatgtatacacacaagagacattaaccagactgagcaagttgtatttatatatttagaaacacacatacatacatacataagaactgttaaaaaaagagactgaatgtaaaagagaacaaggtgtgggggggggcggggtgaaggtatttgggaaggtttggaaggaagaaagggaaaacagacaggaaattattgtaatctcggaaaaaaaaaagctaaaaagaaaaaaaatatttaaaaaagagcacaaggttgcttatcaccagaatatttgctccaccctgcctgccccagcaaggtcacctgttagttagctcatctttctcagggcaactagaccacagcatttttgcgaacacgcccccttttccggtggaaagtgagggagaatcggtgtttctatctcggaggttccagctccccggattcttggctttttgtagactcagttcttccttttataagtcgagggggtctaaccagaagcttgtcttgtgtaactgcgggggtttaggggccacccaggagggcggggctcaggggcggggagagatccatgacgcaagaggctccggccaatgaaaatatctcgcggcgccggccgagtcgccctgccataaaaagagaggcgcggcggggctccccagccggcgactgccctagactccgagagtgtccctaggtgctgagccccagtccgggtgacggccacaggttacggccgccggctaagctgagccgcagcgcttgttagcaccctagggtgtctcgggagcggtcgcgccgggtccatggagaagccgcggggagtcaggtgcaccaatgggttctccgagcgggagctgccgcggcccggggccagcccgcctgccgagaagtcccggccgcccgaggccaagggcgcacagccggccgacgcctggaaggcagggcggcaccgcagcgaggaggaaaaccaggtgaacctccccaaactggcggccgcttactcgtccattctgctctcgctgggcgaggacccccagcggcaggggctgctcaagacgccctggagggcggccaccgccatgcagtacttcaccaagggataccaggagaccatctcaggtccgtgcgtgcgccggggtgtgctgggcgccaggaggcggcttcaggaagcgtgggcagctccgggaactttcccgagttgcttcacttttggcgcagggagccaagttgtcaggtcccggtcccagctgtggccccagagcctccacctggcggaggcgagggtccctcctggctggcactcagggctctggggagggtgaatgcatagccactacactgaactccggggcgggaagggatgtgagaccctcttaccccagcgctcagaacgcgattaggcacgtgcagcatccaccgttcccccccccccccgcaaggatcccgtggacacttgttgatgggacgcgtcttgcttttgggtgaagccaggtttccgttacaccccgtgagccaagtaaagttaggtacttgtaatggggtagggaacttcagagaactggaatttgcatccaactactctagcttaggactttacaccaaaatttggcacaattctggattcggacttcctagcagtttgaggtgtggacttttcttgagctagcattattgctgaaagtctttaatgtttgctccctcaaagaataaagggacactccaccccacccccgcgctgatactctgatggttgaagttcactggacctgggattccgtgcttttgccctcctagccacccacctccacccccgccgcctaaaatccacagtctgagcctgctggcatcaagtctttcccagccagtgacgaggcagttgctgtgggtacagaggcagggtgaagaggaagtggaaagcagggccttgctgcctatttggttaagcagtgttggcctttataaaaaagaagctctggttcctttggctgagttcaaaggcctcatttccagtttacatctgggcatctctgtgacgtgtgtctttgcctccaccattacacacggaaaaaacaaaaaaccaaaaacaaaccacactgctttgaaaggtagtaatcctgtctgttcctgaaggcattgagagcatggggacccgtcctagaaagaacaattatttctgccaaaccttcctcgacctcaaaggaagggtgggagatcagagcctgagaagggtggggccccaaaggaaacgaaactacttcctaataattcgaggaagtgggcccagatctagttctgagtctgagtttcaccattttacacttatttgatgatgaaagtttggatctcaaaagcagagtttgaaaatgcaaaaactgaagaacaaatagtcactgagattttttttctgagagttcaatatctgggagtgttagtgtgtttgactgtccagggtgtaaccaggaggagtgtcttgacagagccttgttcactctgcctcttttagacgtaaaaggtggtcctcactggcatccttcagctgagcccctccctcctgcccatctcattactcccagggagaggagcttctagcctgctttgagaatgattgtcacaggcttactcaggagctgagattcagctaaaggagtctaaggactccaaagcagcccccactccaatttattcataggaagtccattgacctagagacaggatttgtctgtcagctgagaagacagggctagtgagtgacagcttaatggctatggagtttccttttctagtgatagaaattagacagaggtgctagttacatagcatcgtgattactgctgaactgtatgctttacaaacggttaagatgaagaattttatagatattctaccacaataaaagtcattgattatttgaacatttttttgattgccatcaattgagtgtgtgtgtgtgtatgtgtatgtttccgagacagggtttctctgtgtatccctggctgtcctggaactcactttgtagaccaggctggcctcgaactcagaaatctgcctgcctctgcctcccgagtgctgggactaaaggcttgtgccaccacacctggctttttttttttttttaaatatagtttttgctggcatggagccagatatataggtaaaccagactagtctagaactaggagatctgcctgcctctgcctctggaatgaagagtttaaaggtgtgagctactctgtggctgcctcaatggaatggccttgggtaaccctgaactttgacatgaagtgtcattcttttatccacatgaggaagctaagtgggacgttacacatggtgggaagcaggtagtctagccgctggttggtagacacttccttatgttgcaatagagcaagatgaatcagtgcatttttctaccaggcatgtggacagagagaggtgtggactgagtaagatcaacttgtcacatgtaataaagtatagtaaagattaaatgtttaataacctaatttttgtataacttgtatttatttttatttcatatgcatttgtattttgcctccatgtatgtctgtatgtgggattggatctcttggaattgcagttgtgagctgccacataggtgctgggaattgaacccagatcttctggaagaacacccagtgctcttaaccactgaaccatctctcccctaaatgtttagttttaaatatgtttttattagtttaagaattctattcatacctgagtggtgagagcagcagcacaccttttatcccaccagaggcttgcagatctgagttcgaggccagcctggtctagggagtgagttccaaggactgccagggctacacagaaacaacaaagaattccattcatatatacaatgtatttagatcagatttccgcctcacccctcctaattttcttttatccttctgtgccccactcttccttcctgccctccccttcccaactttctgcctttaaatttttatatttatgttttaataaatgtatatttataaatgtaaatttgcgaaacctatggcgtccatatgttcatggttatgtggccatccactggactgtttggcctgctgggagtaacatccttaaagaaaccgactctcccaagaagccatcaactgagataagagacttaggtgtggggcttgtgagcctctccccatccatgctggattcttgataaaaaaccaaacctggccaggcatggtggcccacgcctttaatcccagcacttgggaggcagaggcaggcgaatttctgagttccaggtcagccttgtctacagagtgagttccaggacagccagggctacacagagaaaccctgtcttaaaaaaaccaaaaaccaaaccaaaacaaaaaaccctaatttttcaaaaaaagtaacaatttcataataatttccataaagttatttttttatttcacagtatgagtgttttgtcttcctgtacatatgtacaccacatgtacacaggggccctcggaggctagaggaaggcatcagatcccttgaaactggagttacagacgtgtgacccagcacgtgggtgctgccattccaccagatcctatatgtaagctgagccagccctagagagcctgatattttttttttaaaagcttgtggacaaacataggtatttatattgtttgtttgcctggtgctttattaattctttgttgacttatggcagaaattatttaattacttgatactctgcatgttttcccttcgcttctggattctgttcatttcttgcccctgggaagtttgtcacttttccacctttttccctgtcacacctttctcctctttccagtgcctgtctttccatgggagtgactctggtcatctgtgacagggctgcctgcatactaagtctccctctggttgtcactactgtagcttgtgggctagcagctttcctcagtgtgtatcctaggactcttggcatctctaacctcttgaggtttccaaggcaatctaggcttcaccttcacagcttcccacagtggcctctcttggcctccttgcagggacacccctgccacacacctggcctcagtggcttttcttagttgtggagggcaattccataaccccttctatcattgactctaaagccagaactgtgtggctgaagctgccaagttctgctgctttctgggattggaacatggcccactctcttaatagcatctaaaccaactttctgtctagtttgcctgtcctggaacctgttctgtacaccagtctgaccttgaacccaaagatctgcatgcctctgggattaaaggtgtttacaaccacaccttgacctaaactgttcttttaattccttttcacaagatggaagtagggtctttcccacatagttccagcatatagtggtgcaggatataattgccattccagaaatgcagaaaggaacatgatgaggaaataccggataaactcaaaactgcatctccatgtctgtctgtcagctctccagatctccaattctttttagctttgttgacagcagcatgctgcttctccctcttggaagtgtgtgatctgcttttttattgtgattttaaagggggttacagttacgagatttcatgaatctcagatgagactttgaactttggacttttaaatactgttgaacctggggaccatggggacttttaaagttggactaaatacattttgcattatgtcatggctacaagtctatgggggccagggagtgaaatatggtggttggaataggtatagccctcataaacttgtgtttgaatgcttggcccatagaaaaggcgctactaagaggcatggccttaataggaagtggatcactatggggcaggcattgaggtctcctatgctcaagctatacccagtgtggcacacagtgtcctgcctgcagatcaagatgtaggactcttggctcttccagcactatgtcttcctgcatgcagccatgcttcctgcaatgacaataatggactaaacctcaaactggaatccagccccagtgaaatgtttttctttataaataggagttgctgtggtcgtggtgtcttttcacaacagtaaaaccctaagacaattgatggactacaaacggtgacagctaaagtgtcaaggtagataagaaataaaattcttgatttattttactttttaattatatgtaagcgagaggggaggagggagcaagtgagagcgcatgcacacatgaagccagaagagggcgtcacattccttgaggctgtagtagtaggcagttgtgagtgctagggtctgaacgtgggtcctctagaagaatagtacacactcttgtattctggatgaagagtaattcatgcccttgttttagaaatatatattatagggcctgtggagatggcccagttgataatgtgcttactgaataaccattaagacccaagtttgattcccagtatccatataagaaagcaaggcaaggtggcatacttgtgtttatcttagtactgaggaggtagagacaggatccctgttggcttgctggctacctggctacctagtctagtcaaactggtaggctccaggttcatggtagagagactgtcttaagagatgaggaactgagggaaatgatatcacacacacacacacacacacacacaccccagttcatcttaagggctgaaatgtcactgaataaacatgaatatgtagctcatttaaatcttgactcactaataacttctgttaattttgttagtgaattattaaatagagcatatttgttatcaggaagaacactgaataaagaggaaacaagaaatttgttgctacagtagtttatgtagatcagagctgtcaagacaaggggcaaaaagccagaaatggggaggtgcaggtactgcatgcaacactggcatgacagacaagcttttctgtcatgaagacaccatgatcaaggcaatttataaaggaaatttaagtgttagctttatagcttcagagggtgaatccatgaccatcagggcagtgagtgtagcagcaggcaggcagacatggtactagagcagtggctggtttctctctggaggcagagagagggcgagagggcagacagacagacaccctaacagactggtcctgacatgggctcttaatcgccaagcctacacccagagtcacactttctccaacaaggccacacctcctaatccttccaaaaaggttccacgaactggggaccaagcatttaaacatgagcctacataggagcagggcaaagtattctcattcaaaccactgccacagcattgctactgatgctagtttctcaggctgccaaagaaaagtactacagctggggatttaagctggggattttacagccctggatgccaagtctgaaaaccctagcttcctctgaaactatactggagaccttccatgcctcctcccagtttctggttgtagaactcagtccatcttccttggtttgaagtcatcacttgctctgatctctacccctgccagtgtccttgcttttgttgtctctggacactgtggtgtgcctcgtctgaatttgctgagttacacctggagcatcaccatacgtagtaaaatcatattcagaggcacccagatcttcaacaggattttcttggtagagtacaagtcaacccaaagcagtactaaatatttattcatgagattaactgggaattttaccagtgtttctatttacttgtttaattatttatttgagacagggtctctgtgtagccctggctggcctggaacgcactctgtagatcaggctggcctggaactccctgagacccaccagcctctccctcttgaatgctgagattgagtgtttgtaccaccaggcttggaggcacttactgtgttccaggcattgtgcagagtgctgagaaaagaatgagtgaagctggacatggttcaagccctcccgggagggcctttagagaaaagacagccagtcatggggaagagaagtgtgatgatagccggtagggagggtgcttggtcagtgccgggagatgacagcatgaagcgaggcttcaatgctgccttgactgtctgatgtctttgcctgctgacttgagcccttgacaggtgtcaccttgctttatcttcataatagccctatagagcatgtaatattcccatgttgtatacaaggaaacaagactcagggaacacttgctccagatggtggctgacaagcagcagagctgagaggatcaggagcaccgatgtgacctggctttcagttgatgacagtgtcgtactaatttacttggctttcttcctctcctttcttgtcctgctgtttgctttgtctggctctagaaactcctccacaccctggcatctctccaggtttgcatttgagtttttagtgtttcggtgaataaggctgcggtaccagaattgaccaggagagggctgatgtctaattactggttttgcaattaggaatctggattgcgtggatcctaattccgtgttatgtgaagggagatgtttctggtagactctccaccaataggtggttgtgagccaacatgtggttgctgggatttgaacttaggacctagaagagcagtcggtgctcttaaccgctgagccatctctccagtctcatccttgagcatcttctaggtctctcacatttgactttttagttgctgaagaaacggcccatcagtcctgcagaatctaccgcatcagcctttgcttattttatccccaagatttagtctttcgtgagcccgttgtttcttgtattgcactaattatcaggttgagaagcttgctcttccaaaacaaaaaccttcaagtgtaggtaagactgttgcatagaaggaagcatggcattctctctggggcagctcagcaaatgtctttcttttctggcatcaagctcaatcagcctaaagtgtctcagctgatctcatcaattagagtttccagccagcccgtcacctaccgatttaggatctgttggtgactgcctacatctggtatttactagaaaggacggactaatgatctttggtccttaaatttatcagttgaaattctaagaggaactcttgtgtccctttaaaaaggagctatataactctggtaaaaaattttaaaagtacagaaagctttaaaacataaaaaagcttatgattttagatgtctaattctgtaatagaagactacttaatcatggcttaatctagaaaccataaaatgtgacaaacgtcaactaagaattttcatgtgatggataccatcacaagtgagtcaaatgataagcgggaagacacactcatgccctgggcagggggctgatgacaatggggctgataatgtcagatgagatgctggaaagtggtgggagaaatgtgaccacaaaactggaagctgccaaggtgtttaaagcgaagtaaattttataaaaattttataaaaattctatgtttttgctacatagaatgcaaaacacatgactagtgtattaatctgtttgctattagcaaggctgtctgccaatagcagattatcatctttcagaagacttgaaagttacacatggactgattctacaggggctaattccaaagggctctgcaaacaccaggaaatgtgattgtcctcactctccacgagagaagcacacaggtcctacctatagatacattggtcttttgttggattggcaaacatacagaaatttgatactatattattgagaccataagaaatcatgatatatatattcaagattaggtactgcgtggaaatgacttaaatacccattgccttacagtttagtgagggatatgggtgaggctagaaatgctctgcagcatgccacagctgtcactgggcaatgctagtgtcgggcaccagctcctatagaatcagttcatgtgtaactttcaagtcttctgaagatgataatctgctcttggcaggcagccttgctaatagcaaacagattaatgcactagtcatgtgttatgtattctatgtagcaaaaacacttataaactaaaagataatttttaccatgttatagatacaacttacaacagagaggaacttctggagaatattagcagatgagacagacagtagcagtgaaaggcagctatgaaatcacggtagttctacagttcactagtatgtggtgtcagacattggacccggggccttatgcatgctagttaacagccctaccacccgctagtatgaccagcccaacagttgatgcttttccaattatgacttaatactgaaatatttatttgcatttgatgacaaacagcacagtgtgtgctatgatacataagtctagaggaagctgcactctgtgcacagtaaaagcatgtgtatgtatacatatgcatgtgtgtggaggccaggggttcatactgacttagtgccctggataactggggcagtgtctctccctgaatttgcagctcgctgtttgtctagatggctagcaagtccctggaaatcctcctgcctctaccttcctatggtagaaaatatttaatttcaatccagggtgtctaccctgtctttgatcattcatttcctggataaatgacccacatgacctttatgtttataataagcctttattagtactagtgctggacagatatctaccctctatgctattaaaatctatttccgactgataaccctgagttaagtccttacatagtttcattttaactccagttggccagtccccatggccatgctttcttgactcctaactcatggtgtctttctcctttttccaccttttctctctcctcgtggtctcctcctaccccaagcctgggaaccccaagccggcctacctcaattctgcacagctgttggctgtaggcatctttattcaccaatcagaaataactttggggaggggccaggtcacatagtgtcacttgggcctaagagtggactcttcttgtctttggggcaaccaggtcttagggaccacacctagcattgcattatgtagcagcaggccaacccccaacagcatcccagcgctggttatggctcccgtgcccaatggtttatgttttgagggatctgaactgagtcctgaggcttgtacggccagcatttcaccaactgagcttcctctctaccccaggtatttactttaaaaatggatttatgcatatttcatgatagtaaatgattagagcagactcctgtcgggatgtattctatacataccttggttttacaaatgttgctaagatacctgattctgatgtcctcccaccccaaattgtcaccaatatcctaagcaacccatacataaatgaattaacacagtttaacttcatgggtcaactgtactttgatattttttaattttttaagaacatgcttggattttcaaataagttgaaaatactgtgacagccactgtacgtagctcagagagagctccaggctcatctcaccatccactgtatggagaaaatggcaagagtatgaactatgcccagccctgtaatcaaccctgcctgccagctcctcctgaagtcactccatgcaggctctgatgctgctccacacagccctagcagagttgtccaaccgagactagctcctcagtggactgctcagggctcatctattccggtctgttgccggttctgtcagcccagttgcttctggttctccacttagcacagtgagacagacaggggggtccagtcttgcagcagcagctgctgtgtctattcttgccgttcacactgcttcccagtaaacatatgccggagaagcccttggtccacagcagtgtcttaaagcacagttaccatgcaacagcccagaacctcggactgcttccgtgttggcttctttcccccagcgagagccaaagcaaaagctgggcaagcagttgtttctctaattaaagccacacgcccaagtcccgctggtaaggtcactggtgtgttgttgggggttggtgactcagaaccacttcgtgtgttccagtcttgagtctccccagtgtatgactgatgggcgttatgcaagcccttcaagctgaagaagctgtccaggaaggaagcagttagcagtgccagggtgctcagctgttaatgttaattagggacaacggataggagaaatgcgtgcttcaccgaagaaaaatgtctgaacaccaaaatgtaaatattaggaaaactttgcaaggtatacaataaaaaggaaaagaaactttgactctttaacagtccaagcaaatcccaggtctggcgaacactgccagttctcgattacttgaattaaaaacaataagctcccacaaaaaagtataaatacaagaaaaactcaaatatttaatataccctggaagaaagaattttcagcaaaacacaaattttaaagcatttgtttatccaattttaattttttttactataaaataactcaacatatccaacctctttccctctgtcctttctctctctctccctttctttctctctctcccttctttccttccttccttccttccttccttccttccttccttccttccttccttccttctgagagttccacaatgtagactaggctagcctaaaactcatagagacccatgggtctccctgttctttttttttttttttaaatcttttactgcaatacaacaatgaagtgaacagtaattagatccctaccaatttcccccaaacaaacaaagaatgtaaacaggaaaatgactctgcctatgtgtgcagcttctcaaatcatgtcagagggtctcacattcaataatcaagacattttaaaatagcagtaattattttcgttttaagaaaaagcaccctttctaccctccccaccccatccccagcactgaacacgaagaatgggcttccttctgcatcagtctcatactaatgtgaagcagcaacgatgactatcaataatttggcatttctgtttacagatgctccaatttttccccctcaatttcaaaaagccattatccagtgttgccataaaacagactgcaggttttaggtagcaaagattctttcagaaaccaatgttaagtcaaagaaaagagaaagcagggcatcacactaaatttctggatctagtacactagaaagaatgaaacccaggaaaagttacctactgcttagaagaataacgacctgtaaaggcagatgtttggttgtatagtattttacactgtgtggatcttgcagcatctgctaattgaagcagacatgcaactgtatgtatccctgccctatatcctagctccccacccctaccaacctactaccatattatgccaaatattgtggatatgagcccacgtcaccccagacaatccagtgaacaaggttagtgtaatgcactggtgtgagtgtgaggtagaaaagggtctccctgctctagtggaccgctgcccatacagtccatgagggcagagggagccctgctctagtggaccgctgcccatacagtccatgagagcagagggagccctgctctagtggaccgctgcccatacagtccatgaggacagagggagccctgctctagtggaccgctgcccatacagtccatgagggcagagggagtagaggttatgaaaggggttggggttcagaagccctgagtgaataagccacactggacccgcactcagtaggcagatcaactttacttagggtgactgaaggctcataaagtttggggggactgagggatgggcaaggtcattggctggggttgctggctgacaggttttgttaggagaaaggaaactggtcctatgaactatgaagcaacatgaggtccctcaggtagagatatatatggggtggggggctagatcagactagactagactagatcagagaaggagatgggagtctcccatattgccccgagcaaagaggctatctggtcatggtggacttcaacgttaattagcagtttccccacagagacccacttgcttctggtccctcagtgctaggactaaagtcatgcaccaccatcgcctggctgcagttctgtctcaggtaacagatttgataatgagtaaggaaatgttataaggaaatgtaatttggattataaaatgcttgctttcgtaaaaattcctcactattataggagcgtgaggctgggacagcttctccagagggtccctgatgaactcgggaggatggtagaatatgaggggagcagaggtgggtaatggtaggagaccggggctgcctaggctcaggcactaggttctgggagaggacaaatgggggccacacaggcagcctagaaggggcttacagctcagttctgggttttggaccatacagttttcaaaacaaaagcattgaggtttcatttaatatccaactagccattgtgagggaatagaccagtgtgagaaacactgaccaagctctaacagaactctctctacataagcagtcatggcaaaaccacacacacacacacacatacacactcacacacacactcacacactcacactcacacacacacactcacacactcgcacacacactcacacataaacacacactcacacacacacacacaccccactgagcgtgccctggaatcagagagaactagaagcacaggcagctctgtgcctcccaggtcttcagcatcatttgcatagatcgcagtgaccccacaaggttgtaatggagcagcaaaaacaaaacacaacaaacccctgtcgatcaggagagcccactaccaatgtgtgctaagctcctgtgctcccagtaggttaggagcatagccatgcaaactccgtgcagcaccagcccttgactaagagtaagccgctgtgctccagagtggctctgttaaacgtgactgttgtttcagggtggactcctgcctattcactttggaagtctgcctcgttgtacctgcagagcccccgccttctattcgccattctgttgatctgtctatgctttatccttgtgttttgttttctgtggccttaaaaacaatagactgcatgtataaacatgtaaatatacacaccattagcatcatgtaatatgtaagtgtgtaagttgtgtgaggatactccacggtgttcatacagaaataaagtgcttcatgattcgtttcacagagcgtagccctattgtggccaggcatggtggtacttttttttttttttttttggctttttgagacagggtttttctgtatagccctggctgtcctggaactcacttcgtagaccaggctggcctcaaactcagaaatccgcctgcctctgcctcccaagtgctgggattaaaggcgtgcagcaccacgcctggcgatggtacattcttataattcccaatactcagggaggtgacacctgggttacatgagactttcaaaaaaaaaaaaaaaaagaaaaacaaaacaaaaagaaccaaaagcatatcccatcattaagcaatgtaaatttgattttattgaacataggaaggtatgagcttacacatgaccctgtacctgttagctgtactattactggtatgtctaaagttatcttttcattttacatgtggtggtagtactgcctcacctgatcttctagaagaattaagaaatgacaaagcactgggttcttttttttttttttcaaatttttattagatattttctttatttacatttcaaatgcgatcccgaaagtcccctataccctccccctgccctgcttccctacccactcactcccacttcttggccctggcattcccctgtactgaggcatataaagtttgcaagaccaaggggcctctttcccaatgatgggcgactaggccatcttctcatacatatgcagctagagacatgagctctgggggatactggctagttcatattgttgttccacctatagggttgcagaccccttcagcaacttgggtactttctctagcgtctccattgggggccctgtgttccatccaatagatgactgtgagcatccacttctgtatttgccctgggttcttaatatattccccctttcatggtgagcgaggaccatggaattggcttaagaatgtaagacactttggggctttgagttaccatattaaaagtccaacaaccttgaggcttttgctctgtagggacatcttgagcacacagagataccacttgtttgagaaatagctgaaacactggatcagctggatgtttgagtaaaagcccctagctgactctgtcccaggtggaggacatctgctctgggtcctgtctcatttctggtccctaggacctatggacccaataagctctgctttagaacactcgcttccggtttgcagcagggtagtcttagataagggtaagtagacttttttgctcagagtaaagagagagacttgaacctgttttaggctatagatttaaagttgtgaattaccagtgcaaggctggcacttgagggtgctggaatgctatgaaggaggggagggaaaggaccctgaggtgtctgcattgttagtgggcagtgggagagaattcccacgctgaattctgaaggagtcctgtgtttaactttgtcttgatgcgtggtgttacaagggcactatggagtgccaaagcccaaagatggggcacttcttctggtatcctgtgaccttaagctttgagaacaggtaactgtggtactaggggaacccatgacatagtgctgtgggccttccaagtttctctgaggtcagagacactgggaaagcttagacctgtgacacatttttttttctctcaaacaggaacatttatggtttttttttttaatttttgttttgttttgttttgttttcaaaactctgtatagccctggttgtcttggaacttaacactggctggctttgaactcacgaagatccacttgcctctgtctcccgatcgctgggattaaaggtatgcactatcactgcctgttgctaaacttatctttgatagcatctttagatgatttaattctgggcaagatccgagtccccatgccctgggatgtgttgcccccgcctgcctgggctccattgttcgttccccttatagacaggatgtatagactctgctatatctttcttgtcctttggatggattttatttaaggctccaaagccatctttcatcaggtttgcatgatggaagatgaatcaaatatcccaccctagccttgaatgctattcccaggctcaatgatggtggtaaaaacaagacagaagtttcctgtgtctttcccgtgtgcccttctccctggcaaaacaggtctgtttgtactaaatgtgcacatacatatgtgggcaggaacagtaggcgatgtgaaggttctgggtagcaactgagatgctccacagcaggctctcagtggtggtggaccagcatcacagtgtctaggcgttttcagaaatcagattctcaagcccacccagacccacagagactgtggctgggccccacggaagggtctgacatccttgcttcagaagaggcttagagagcatcgtatgtgtgctgtactatattttcaggaggagtcctactgggcaagaggcttacgggatggctgctcaaccgtgttgcttccttgcttaaccctgacaagggcagtggtggtgtggacagaccaacttcaggaggttctggtttcctttgtggttgtgactaacaggcagcaggaaggaggatgctatgaaccccgtttccagggttaccttcttggtgctgatagcaggcaggaaattaaaacaatctgtgataaagctttgttcttattatccacagatggcagctttcagatatgtgggagcaaactataagtaaatatagctggaaaactttattattgaagaaaaatgacttggtgaggtcaagtttacagtctgggttcattttaatgaaatgtgatataggtaaaatactagcatcagttctacacaaagcattgcctttggaggacagttaggcttcttcttggtctgattttcggtatataaacatttatatcatctcaagtcaaaactacatggagtggctggggagatggctccagtggtcaagggcatttgctgatcttccagagtacgcaagttcaattccaagcacctctaactccaggtccaggggatgctgtgtccttctgtggactccaggtgtctgcattcacatgagcacacactccatcctcatacacacaattaaagaaaaagcctctatcttttctatcatccccaaattttctccttgtcaatttgcaatctgttccacttctctgcccccataagccacctatcccccgccccacttactatactttggcctttccttgaacaacttcacacctagggcaataatctgtcaattggctgtcttttcagattgcacaaaactgagctgagaagagtgatatggctgggagatacagcctcctcagataccactgcatatgtgatctgtcattggccgatattgctgggccatgtttctgtgtgactttatgccacgcaaagacctaacataccattatgtgtcagtatgtttttcaccaagttcgtttttcactgagttatacatggcagttctatttatctatggtatctatcatccttttttaaattttgaagtaattttagacttatgacaaaattacaaagatggtacagagggttttcatagaccatctcactatcttctaccaaaaaactctctcatgcccatggtacagttgctaacacttaagccaatattggcataatgatattaaccaacatgttttattcaaattctgattttagttttaattgcacttagctatcatattttcactaatctactctgacaattttacagctttttcatgttttttatgaccttaatgatttttcaaaacattgcccatggagccatgcctgatggtacagtacactcttatcatcccagctacttggacagccaagctgggcagattggttcaagtctagcctagataagttagtgagcccttatctctagaaaactctgctaaagtgatcttaaagtgtagcctattcctcttcctgatgattagactacagttgtaaattttgggtggtatccaatgtcattatgtcctacaagtggttgagtcacccctgacctaccaagtttctccactgtagagatgccatttttcccactgtgccttgcctaaggtccaacagcaagctgggtcctacttagcctagcttgaggctgactctaacatgtgtagtcgtgaaaagtttgttcctttgccagagaaaatggatatctggcatcccctgctttccttagttcgtttagaaacatgcattgttgtgtttatactctcatgtttatttctcaaggatttcgagtgatttcaaggattttagtgagctgtccatgccttatcatgatactgaactcttagagaaatccagggtacttctgggaacaccacgaagctatatttaaattgcttttagaaatacaaccaaaggttagggcagagtattctgcataggtgactgctgccggagaagggctatttacttagaaaatgacggggcttgtccctgttggtctgtatttaaaccctgcacatgcccattcttgctggccacctagtgactcctaccactcaatccaaggtgactccaagtgacctgatgaaacagaggcttctgcatgactcagtacctgagccccttgaaggtcaggcagtgggggtgggcatttgtctatctccgtgactcatagcctgcctttccgaggggaaaattgctgtgggcagctgcaaagccatgctcatcccccacacttgtcttattgtactgcgtggactgggtatccccggatccttcaagtctaccaagccgtgagatcaggggtttcctgtgcatgtgtgacagtgacaggtgacacttgcatacaatgttgtcaacacggtggctatatcacagagatgactgtagctcatatccctttatctttctgcagccagggcaggatgctcttgctgtcacaggatgttaagcgagctgagtgctcccatgggtatcctctggttaaccttttcctttgcacatgaggaaaggattgttaccaagtgcagcctttaaacctaaggcatcttgcctgagctgtctcttgtctgcctggccatatgtgtgaggttcacagcttacatgactgctgccccctaaagaggcatacacatacagaatataggatttatttcattatgaaggcaaccacttagagtaagtttgacgtttcccttggtaattttggagaagtttgccaagtttgtcggtgtgtggatttttgtacatttttgttaggaagtgtgattgtgggaagagtcgacccccgcccccctttacctccatgcacagccgctcactttatcatgcccttccccctcctcccttccagctcaggatacaaatgcatttggaagtctgcatttctcctgaatgttttcgatcaattaaggaagagagacagcttgcttagaagggaaagttaactaatttccatttttattttaaaaatatttactatccttcagtatttaaccaattttgtgttttcccggttccagatgtcctgaatgatgctatatttgatgaagatcatgacgagatggtgattgtgaaggacatagatatgttctccatgtgtgagcatcaccttgttccatttgtaggaagggtaagttctccttattgcctaactatttaagaaagtataatgaaaatctcaaattaggacaattgtatttcaaactgtcaactgattcttaatattctcaatatttacagtctacacaggtaatttttgactgttttggctaacctaataattggaaatttaagctgggcagtaaggtcacatgcctgtaaccctaggaggcaaaggcaggcagatcactgagttcaaggccagcctggtctacagagagagttgtgagttctaggacagtcagggctacaaagagaaatcctgtttcaaaaaccaaaaactaaagagaaaaggaaatttaaaaagcaaaccaagccaggtgatggcatatgtctataacattagcaatcatgaggtgggggcaggaggatgtctctttgggaccagcctatgcatatagagagactttgtcttgaaaacaacccccaaagatggcccacagggacctttcatcattagcactgtgtttgttggttgggataataaggttaggcttacccactttaaggtggttcctgctgctctgaaaagctttgccctgtctttgagtgagccgtttgctcccaggtccatgtgcacagagcatgacatctgtgacctcagcaggcaggactgcagggcttctggagccagaggttatggtattagtgggtttaattggattctatccctttttacattagggaaagagagtcgaatgcaagctagataagtcagagttgtcattagatgcaccttcgaggacatgaatgttgacaataacaatgccctcttatgccagctctcaatagtttaattctaatttgactttccaataggaaacttgtaggctatatatgaatatttaatatcttctttgctttttgttaaaatatttttactttcttatggttggaaaacagaaatggcacgaagtatgaagattttcattgtcatacattattgtatattgtatataaaccacaattctgctcttgttttcttttcttgctgttaaaaacaatatagcctgagcagggcatggtggcacacacctttaatcccagaggcagaggcaggtatccgcctggcttgtatatctagttccaggtcagccaaggttcttacaaagagaagctctgtcttgaaaagccaatcagtcaaaacaaaacaaacaacgaaaaaccccaaccgaccaaccaacaaacaaggtcactctcaaagctagtatagtcaccaactttctcttggtctacatatgcatccatttctgctgggatgtatctaggaatggggttgcagggtcatagatatgcccatattcaccttactccctgctggccttcagctctgcaaaggaacatgtgggagttatcaatattttatattccagtagcacttggtacttccttctttagtatttagtactgtctgtctgtctgtctgtctgtctatctatctatctatctatcctcccacttatctattatctatctactctctgcatacttttaaaaaacttttaattgattctttgtgaatttcacatcattcactccaatcccattcatctccctgtcccttcacatcatcctctgtccttgcaacttctcccctccagagaaaacaaccaaccaaccaaccaaccaacccccaaccaaccaatcaaccaaccaaccaaccaacccccaatcaaccaatcaaccaaccaaccaaccaaaccccaaccaaccaatcaaccaaccaaccaaccaaccaaaccccaaccaaccaaccaacccccaacccccaaccaaccaaccaacccccaaccaaccaatcaaccaaccaaccaaccaacccccaaccaaccaatcaaccaaccaaccaaccaacccccaaccaaccactcaaccaaccaaccaaacaaacatacagaatcctgccatggaagctgtgctgtgtcacggtatgtcaccatgtgtcacacagtatactcttttgtcccaaatagctttacttgtgaatgttcattgcaatgaggtccggtttgaggccatctggcttctgccatacttatcagtcagtactggaccctcacagggatttcttggacattcctctgttgctctgtgtcattgagatcctgcagttttggatctgagggacctaacccttcacatactccaacagttcatggatgggtggatgttggggtgggctagctcagggccctgcatctaggcttgggtggaagctgagttagtcaatcctccagcacacctgggcctgctccatggaataacaaggaataacatcatttgtatgtacagttcctgccatttaaaggagtctccctgactatactgtccgtgatgttacaagcctatttttttttttttccttattgagtatagtttttctcgacaggttttcagatttgaattaagaattttactaaggaacataacaggtttacttttaatttgccatttcagtaacaagtttgttcttaagaagtttcttcatataatttgaaagtatgtatggaattgcttcataggtttatcccattgtcactgtgataaacttagcctgtgtgtatgctagggtcttcctgtatctgtttgtgttgttatgaagtgctttctgtgtcttcatttagctggtaatctctctctcttccctgaaggtccatattggctatcttcctaacaagcaagtccttggtctcagtaaacttgccaggtaagtatgaggtctctagaattgctcctatttgccaagactctcaagatttcttccaggctggagcaatggctcactggttaaaagcactgactgctcttccagagagcaccagggttcaattcctagcacccacatggcagctcacaactgtctctaactccaggatctgacactcacacagatgcatgcagacaaaacaccaatgcaccaaaaatgtaatataaaatgtcttcgacattataaaatgtctaccttctggatctaacttagaagttagatctgttcttgcataggcagccctaacattgtctctgcctccttctccctcactgcctgttcctctcttcccccaaacccattactgaggtatgagctcacagctttctctgtagagttttccccaactggaaaatatccgtcacccccagtccagccctggatcttaagaggaggttagttagcggtgagagatccgagaggaagcacacacgtgagtctagctgcactatctttctatctggggagacagagagtaaagagtatttgcatatatggagaatagtacccagagcatagcaggaagtacatgtaagtcatgcaggcaaaaaacagatcccaagactcacagtaaggcctactcttctgaagctatcatacgtctccaaagcctacactgattcccagtgaactgcacacaagcagaggcattggcttgtctcactcttccaggtattctgccaagggtcttgcccagcagttgaacagaaacaactagagactgcatacttcacgtcagtgagtctctctattgtcttttctcatgggtgctaggaaggacgtgctctgctagcctgcatctatccttggctgggccttctttccagtgtgaatccttcccgttttcaaatacggctggattggtcagtgtttcccaacattactgacatagataagctttctctcctctgtgagtacattcatgtttacaaggggacagaaagaaagcgaagggtttcacacattgctgtataataaggtttctctctaccgcacactcaattatgtattggaaagtcactcatacacatcataggatttctatcccctgtgaaccctgtggttcatgtgattgaaagaaccgtgaagggttttcctgttgcttacacacagggttcctctctagtatgattcataggaagcagccacaaccactgaaggctctcccatgatccttaggtacacggtgcttctgtctggtgtcagtcatttcgagtttagaaagcactgagataactgagggttcctaccctccttgtatttatatgtcttctccatgttcctcattttcacagtggtcatacttaaggatgaatgacctagatggagcacctttttgcgtgtcttctgaatctgtctacatctccactctgtagctttcttctggagtttttatagcacttacactggtttgcaggcctttctattattgttttctgtttccaagctgttagggtgttctggtgtctttaccaggactcttggaggtcacacagtaagaggagccaagccacttgggaccctgttagcatgtgagatacgaggttttaaacttttgatcagcctgcatgtgaggctctggcttcctgctttcctctgtttctcagtccggcaggcaagtccatccatgtctaggtcattggctctgtggctacaaggctgcacctccctttacttggcctgttctcctcctctgctctttttcctgcatgttcatgaattaaaaaaaatttttttttattttcaagctgagcatagtggcaaacctttaatcaggaaaaagaggcaggcagatctgagttcaaggccagcctgatctgcatagtgagctgcagcatagccagggttatgaagagagaccccgactaaaaaaaataacacaatttaagagaaaaagaatttcctaccgcctttacttgggattttaggaagaagaggtgatgtgttgtgcatgtatggcaatttgtgtttagctggaagtcagtgtgcaggtttatttatagatctctgctaggccccacacgacggtggcctaaatgtccttatgtgttttaatttgtttttatggagttagtgaatcctgtgtaggtaggtgtgctgtgttcgagctgtgtgtatgtacatttgtccatgcatatgaagtgtgtgtgtgtgttatggattaagaaccaaatggacgggtaggtaaagaactacagtcattgcatttaaagctaagtttgcttcacttgcctgaggttacagtgacctcagtcacactggaacaaacgtgtttctgtgactgattgctctgtggctttgtgttatagtgagatttgccatagtcctaaatggtagccctcatcttgttcatttctttcttggaatctgtataaacctgtggtggtttaaatgagaatttcccgttggctcacaggtttgaatacttggtccccagttggaggtactgtttggggagtcaggaggcgtggccttgctggaggaagtgtgtttatgggggtgggctttgaggttttgaagccttgtgccattcctagtctgccctctctgcttgtggttcaagatgtgagctctcagcttgctggtccagcttctgtgtctgcctgttgccgggtctccccaccgtgatggcgatggacccataagtccagataaaccctcccctttataagttgtcatggtcatggtgtctagcacagcaacaagaaagcaaaagcagtcttcccccagttacttactcccaaataatagtgagaacagttgattttatatcagctgtgagtgacagcatcatcagtgtgcttattgtacaacacagccataggtgcaggttttctggtcttctctttccaccaaggatgttaattctgcctttatcatgggaatccggcattgccgagtctgtaatacacagtctatccagggaagactgagtcggtgatggcttccatactaagaagtgtcacagagcactgtaagcttaggtgtggcctttttactttcctctctttggtgctcagctcaggtccagggcctcatttaatctaggcaagtgagtggctctaccgatgagccatacccccaggcctctgaagaccttgaagacccctgcatgattgacagcatgagagatgacttctcgagtgacccagtggggccatgaaataaacgacgactcagaggcacaggaggacaatcgtggttatgtcctttcctggtgacaagaccttaaacagctaaatcttctatggagcattacaaagaagctgattgctagcgtgagggcttgccattgcgctaataggattaaaatttaagaataaaatggaacaccaaaccaaggcattgggtgttcaaccgcccatttcttttaagaaataagaatgcttagagatcaaggggtaataaagaaagctatgtcttagcgaaacctcactgttcattttaatcttgtgtgtgcagtttgttgtctgctcacctttaatgcttgacctttccattccagtgaagtcaaatatcaagcaggaaagcctcaagtcacaggaagacaccagaagtgatttgattggattctagtggaagtctagagtaaactcagaccaaaaagctgtatgttttcttgccttagaacaattgaatgaatataattaaatcttgaatttggaattgtagttcctaggtattgacttacttggcttggatggactttccaggtcagctactgcaatggtcagagagaaggaaacagcagccttctcttgaagggggaacgggacgaggtagcttccaccaacttagccagagcatccttgtcttcctagttaacctgtgtgaaggcagctgtggtgcacgtcttcctgtggaccaggtgccccagcctggcctttcccttgacgatgcggtagggcacccccatcttcccccatctttcaacacaggacagacaggaaaaccaccagctcagtggggtctatcatgggcaatcaccaccagctgagccttcttgttctccaccaaagagatgactgtattggcccctgctccaagttttaaagttttgatttagatttccttaatggctgaagatcctgctgtttgcctttttatcatggatttccagggctctttaagcaggcatgactgctcgcgcacatccatgcttttcatctgtcttgcctcacacagctccccttctggctgtcaagtgctttccccttcctcttctcactgcctcctcccacagctgagcttccggtccccccccccccgcccccttatccccacccccaacccctgggttgtgtattaaggccccaactctgttctgatctaagggtccttgaatctgctgctggaatgttctttctcaagtgcagacttcattatgctgccccttttgtgactgcccatagcttttaagacaaagttcaggttctttggaataatggagaagactccagagagtagaaattgaagtctaatcgttgaaatattgaatcagagattgctggagatctaactgactgagggatccattctaatatttagagataaaagtatatgtatcaaaaaagataatcttaaaagcctcaatgaatctttgttctttttgagaccaggccgtactctgtagctgaggctagtctagaactggcagtcctcttgcttcagcatcctgagcactggctttgcaggggtcaggcattacacccagcaaatgtatgactcagttttcatagctgaggtgaggatgcagtacatgggaagccaggaaagctgcctgtgaacatagaggaaacggaatggttaatgttgccatggggtgcccagttccatgagtgttccttgttgactcgccaaagcaatcactcatttgggatgtattgcattcatagaagagccaggtatagtggtgcacaccttgactccccgcactcaggcaggaggatctctgagttcaaggccagcctggtctacttggtgagttctaagggagccagggatatgtagagagactgtctcaccaaccacgagacatgattcatagaagaacctgaaaagttgcctgggtaaagtgtcaacaggagtcacctgctcctgatgacatagcctgctaagactaggtaagttacagactcagctcattgacaaatgacagtggcacaagttctgattgttacagaaacatgttagttgcaatgccattttcagacccagtgaggctcactcctagtgctttacacgaagtcaacaaccactgccatggaggtgcgctgagggaggctgtgatgacctcctggtcctgtgtgggggcggccgtgccgtggggatgtataagcaactgcactgagaatacacaggacctagcacttagccatagtctgtccacatggcaagtcagggcacggacaagatccttggttatcaagagcaggaagaagtgcacacaggtatgtgttcccaaagccctggcagaatgaataccacctgtgcagctttcagtcggcctgaagtgatcagtgcggtgggtggggatggggagttggctcagtcccacagtctctaaacatttcgtccaagttttcttcaaaaatccaacttctctttgaaccaaagtctctcaattgtgggctcctgttttttgtttgtttgtttgtttgttttttgtttttttttgtttttgttttttaaaagagtacattaaaaacaaggaaatcctttactctaagagggcaagaaccagggcacaagcagggtacagttacactcagagccaaagttcagtgtcaggtgtctgggactcctatcttggctccaggggtctgagcagttccacctccctgaatttctacccatagcacatagtcagtctaacaggcccaggtggcctcacgccacagctactgtccttggtggtcatcctgtggcactggcatttccaaaatgtgggggtgtctgcagctgagtcacactttcattggtagcctcctgtgatcttttatcagaactctgactctgccacaagctgccagatatcaacttctctccatgaccctttcaatcctgggccttctgctgcaactgaggttgctccttcaccaaaggcctcttctggcctctcacagtacagagcctctgctgcttctgtgaccctttcatgtcactaagctcagctgtcagcatgagatgcaaccttgggcccctctgcattatagctctgtgtgctgaccctgaggaaataactcaaaacatttccccttcatgacactggtctcttagtcacagatagttcttcagctctcgctgacttgtttggattttcccagcagagtgagggttttacttcaggggcattggtcttttgttaatcacagctgagtcttcaactccagcttaacagacacaatagattcttaattcaaaatatcacatgaaggccccgataactagctatggattcactcacaaacctggcttctgttgtctgcattgttctcagcgatgtctttacacttctcagcacagcccattaggcttgacggcctctccagcccaaacacggtcatgtctgtcacagcaatggtccactctcttgtaccagtgttttgtcttatttaggcttactactgctgctgctgtggcccaacacggtgtagatggcagtgtttagatggaacctgtggtttattcctcggagtcaccatttctctaggagcgaaaaatctacattttttaaccactgaacccaagacatagagtgactcgtgccatgggggtctccggattgggtggtcagtgtgatgatgctgtgcaactgataggtgcatgttagctaagatggagcactttgccagaggtgtgtataggtgtgtgtgttctaaactgtctcatagaagaagtgactcttaatggagtccaaatcgtgagcagacagtaatgttttaaagaaatattctgtcatgccaattgctgccctcacacaggttgtccatactaccacctggcaggtttcactgcaaggccaggagcctcttatttgggagagcattaatcctgtgaaatacttatataaaccctttgtgaagaaaggcctgaagaaatctaatcttctctaatctgattactctaatagatttagctggttcagtagttgacctactattaattaacaaatagcctttttatttttaacttgaactttaagctctgataaaacaatatgattaattagagtgcctgagactcagcttgaattgatgactgggggcgtcaagatttgttattcccccgtcgttatgtttgccctaagtgagctctacactcggggcccattagttctcccagtttctctttaggggcatgggagcagagctgaggtgtgttctctgcttgaatgcttccaaaggccatttcccctggccacacacccacctttccagctacaagctcattgtctcacgaggctttgctgaattcattttattaaacacgtgactaaccaaaacatttcttcttttctaggattgtagaaatctacagtagacgactacaaggtaggtataagctttatcaacagaaaacatttcccctattacaaatgtagtaaatgtgacgcagaaatcgagccttcccagggagggtccagaaacttgtgttttaaacctgtagaggaagccccgccgtgctttcaggctcctcccgtgtctacgcatgtacggacattttcaaaccagaccctttacatcgaaacaaaagcaggctcatttgtacacacagcctttcccatttcctgttcaacacaccttaaacaacttccatacctcacacccctaaccacgtggctatttcaagatccattgtgtgaactaatcccccagccaacctctgctctgggaggcatttggattttgtcagtttcctggcattggcatgattctgaggacatgtttgcatgtatcgaaaaaagcaatcttccacccagatgcccctcaacagaggagtggatacagaaaatgtggtacatttacacaatggagtactactcagctattaaaaagaatgaatttatgaaattcctaggcaaacggatggacctggagggcatcatcctgagcgaggtaacccaatcacaaaagaactcacatgatatgtactcactgataagtggatattagcccagaaacttagaatactcaagatataagatacaatttgctaaacgcatgaaactcaagaagaacaaagatcaaagtgtggacactttgccccttcttagaattgggaacaaaacacccatgcaaggagttacagagacaaaaggatggaccatctagagactaccatatccgggatccatcccataatcagccaccaaacgcagacaccattgcatacactagcaagattttgctgaaaggaccctgatatagctctctatgccggggcctagcaaacacagaagtgaatgctcacagtcagctattggatggatcacagggccctcaatggaggagctagagaaagtacccaaggagctaaagcaatctgcaatccaataggtggaacaacaatatgaactaaccagtaccccctggagctcgtgtctctagctgcgtatgtatcagaagatggcctagtcggccatcagtggaaagagaggcccattggacacgcaaactttatatgcctcagtacaggggaacgccagggccaaaaagggggagtaggtgggtaggggagtggcggggagggtatgggggacttttgggatagcattggaaatgaggaaaatacctaataaaaaattttaaaaagaaatgaaatcagcaaaatagaaacacacacacacacacacacacacacacacacagcaatgttccattgtgtctggcctttaaacctacctctttgtcacaccctcagttcaagagcgcctcaccaaacagattgcggtggccatcacagaagccttgcagcctgctggcgttggagtagtgattgaagcgacgtaagtccaaacccgcctttgataatgactcaggagcatcaacaccaacctctgcctctagtgccgctcagcttctctaggaccaagtaacgctgctgacccaggtgccagggatagaaaagatttttgttctgattttaattttatttggatcctgtgcatgtgtatctgtatttgtggaggtcaaaaggagagttacagagaattgtgagcctcccaaaatgggaaccaaattcaggtcagttgatgttctcgtaaccactccagcccctagctttttcttttttccctcttgtgagggctcttggagtcctaagcatcactgcagaagtttgtttgcggtcagcagtattttttttgtgtctcccctgtttccttagctttttcatgaacacacatttgttaaatagaaaaaaagtaagacctggtacaaagggcaactgaagactgtttataaggagaacagacagatattttctagttttcaatgtcattgttaactgaggttttaggaaacagaatcactgctgattgtatttatcaggccgtgtcttgagagcaaagagggcagcagcgtttaaaccagagtaaggagtggcttagtcctcagagtgccatttctctaggcaggaaaacattcaggtgctaccttgaaacagtgttgccatcctcacgcacccaggacttctcactgcgtttagctgtaactgcaaaacccatctatccagctcagagctcagaggccctgtgcagttccacgggaccaactcttttggatcccacattggagtgacagcgtgtggtgtttgtctttctgtgtctgccttcacctcatgtaatggtctctagacacacttagactgagttatgagaattatacacattgtataggacgtcctcgcccatgctatggaggtccccaagctttggccttggtatgctgtctgtcttcgccatgttgcttagactcactgaccactttcccctgcatttgttggcatgatcgatgtccatgagcatctctctggacaccctctttggtacagtgccatcataccacagtcctgagggtggaacaagccctctgaagttcttttaattcagaactacattcagccactcagctgggaagtttcaaggagttgtcctgactaaaaagcccatctgttgggcagtattagatacttaataaagactgcttcaaaattggaagaaaaaaaaagaacttatgttctcattcacccaggaagaaagttctgctttcctctccagatttggatgtatcaaggactcagccacgaataggaataaaagccgaatgagataaaatgattcaagagaaacgttcatgttttcctaagaggggatgttttgatactctggataactgaactgagaccaattttttgccctgagttttatttaactgaaataagtgttgtatctgctcctgtctgcttttaaaccagcttgttttcttatagacacatgtgcatggtaatgcgaggcgtgcagaaaatgaacagcaagactgtcactagcaccatgctgggcgtgttccgggaagaccccaagactcgggaggagttcctcacactaatcaggagctgagctgagcttccgtgctcgagccctggtttgcagaccccgctgctgcggctgttatctgtctcagtcgtacattccagtttcagttggtacacttgtgaactttatgtctcatcatgaattgtatttaataattatttatatagatacgtcaaataaaggtgatcaactaagggtgagcttccgctttcttctcgccaccgtcttagtggcaatgttaaagtgaactgccaggagtataggctatccacagcgactgctgccattcagagcccccagggatgctgggaggagggggaacgcatgcatttggttgacataatcactgactcattagcagagggcactgggcattcaaggagccatggccactatgctgtttgctgcctccagtgggcatagtctaacgttggagtgctggagatggtgaggggttcagagagcattgccctctgtgttcagaggcccacagacaccactctgttttgatcatgtatgtgaagctaccagggacattttcttctttatattaactgtccagctataacactagtctctgagggaaggtggtgggatatctgcctttaattttgctgtgagttaaaaagacaaaattttcaccttctatattttgaaattttgagaagggagaatcgctttctgcagtagtttattctcatgtcagctacgtgcatttagggggttgactcggtgccttggtgagaatatcacaccatttggagagcaggtacttccgccatcctttcggacagccgttacttctcaagtttataagtactgactcggcacatggctgatctcctgtaagaagttcttgggagtttactttgtctattccatggagatgcttcaaaggattttcaaaaactcgtatgaggtattttttgcaattatttccaggatcttttggaactgccgctcagtcagctctgtgggttcccagctcctcacaactgccgagagcataggatgatgagggaggccagggagctgtgcccactgctctggacaggccatgctgtggccgttggtgcacagaggacttcggtctagttcttttcttgttggtgtgtgccttgtcttcagtacaagtgtgtccagaggtgtagctgtccgagaagtgtggctacgtaccagttaccatgtcctccactggggcagtgagggccaaatcaaatcgcagcattcttgctcccctgcaaaaacacaatcatcatagctgttacaatgaagagttctccctctggctgacatagtgctctttaaatgaattcctgtggtcttatctaccacttagacactcaacagcttatgataagacaagagctggtttttaattttattttttttttcacttctactttttcctagcagtttctatatttagagtcaggttgattttgagtttcctttgaaatctaacctgatagcagtgttaacctgctttgctatttagacatttctaggtagaatgctaagtacgtagcctgtgcttggtattttaaagttaacaaaaccagtgtgacttgacttagaggaccaaagagattgttagctatacctttatctttctggggggttggtcacttgtatcccttctgaacgaccctgttgggtcattctctagaagtgttcttaacaaatgcctgacatctccaggctgtgttctcatcagcgtctgtgtaggggtagcctcgtctgtctcaggctcgtctgaagtgtttcaaagtgaccttctcacatccatgacaccgagtacatttggggaattcttaggaatttgatgtaattaaatatactgttcaattacactgtgtggatttactgtatgtatatgtatgttactgaaggttctatttaaatgattaaagtgtttttaattttgttcttgtggatgttgtcttttttcagtcaccattataagtacattatatcaactaatttgattattttggttctgttttagctaaaatatccatcacaaaggttttgtttacccagttaagtgttagagtacaaatctcaatgataatttgatgtaacctgaggctttggtagtttctcttttattattattatttttttaattaggtattttcttcatttacatttccaatgctatcccaaaagtcccccataccctcccccccactcccctatccacccactcccacttcttggccctggcattcccctgtactggggcatataaagtttgcaagaccaatgggtctctctttccactgatggccaactaggccatcttctgatacatatgtagctagagacatgagctccgggggtactggttagttcatattattgttccaactatagggttgcagattcctttagctccttgggtactttctctagctcctccattgggagccctgtgatccatccaatagctgactgtgagcatccacttctgtgtttgctaggccccggcatagtctcacatgagacagctatatcagggtcctttcagcaaaatcttgctagtgtatgcaatggtgtcagcgtttggaggctgattatgggatggatccctgggtatggcagtctctagatggtccatcctttcatctcagctccaaattttgtctctataactccttccatgggtgttttgttcccaattctaagaaggggcaaagtgtccacactttggccttcgttcttcttgagtttcatgtgttttgcaaattatatcttatatcttgggtattctaagtttctgggctaatatccgcttatcagtgagtacatattatgtgagttcttttgtgattgggttacctcagaaaattggacatagtactaccggaggatcccacaatacctctcctgggcatatattcagaagatgttccaactggtaagaaggacacatgctccactatgttcatagcagccttatttataatagccagaagctggaaagaacccagatgcccctcaacagaggaatggatacagaaaatgtggtacatttacacaatggagtactactcagctattaaaaagaatgaatttatgaaattcctaggcaaatggatggacttggaggccatcatcctgagtgaggtaacccaatcacaaaagaactcatatgatatgtactcactgataagtggatattagcccagaaacttagaatacccaagatacaaagcacatgaaactcaagaagagtgaagaccaaagtgtggacactttgccccttcttagaattgggaacaaaacacccatggaaggagttacagagacaaagtttggagctgtgacgaaaggatggaccatctagagactgccatatccagggatccatcccaaaatcagcttccaaacgctgacaccattgcatacaactagcaagattttgctgaaaggacccagatagagttgtctcttgtgagactatgccagggcctagcaaacacagaagtgaatgctcacagtcagctattggatggatcacagggcccccaatggaggagttagagaaagtacccaaggagctaaagggatctgcaaccctataggtggaacaacattatgaactaaccagtacctcagagctcttgactctagctgcatatgtatcaaaagatggcctagtcggccatcagtggaaagagaggcccattggacttgcaaactttatatgccctagtacaggggaatgccagggccaagaagtgggaatgggtcgaatggggagtggggggagggtatgggggacttttgggatagcactggaaatgtaaatgagaaaaatacctaatttaaaaaaagatctcaaagcccatctctagtgacacacttcctccaggaaggccacgcctcctactccttgcaatcctttcaaacggttccactcctggtgactaaacatttaaacctatgagcctatggggaccattctcactcaaaccaccacagaaaatctacaaatgaatcactgtgtttgtgtcactgacagttgaatttcctagagttatttctaaatttgctttttatatgtatatttgtgtgtgtctctttgtataccatctatttgcaggtgtgtgagagagcacagatcctgtggagctggagttcccggtggttgtgagccccttgacacgggtgctgggaatggaattcgcattctatgcaagagcagcaagtagtcttcaccacttagccatccctcccgccccttagatgatttgtgtgtgtcatgaaatattgctttttcagttattaaaacatgtcaaaagcattaacagatggaggagtggatttggctagcagcctgtcattggcagaccctcgctctggatccaacacattcgtgtggttccctcacatgcatagcaaagagctccagccatttgggctgctaggggagctttggtggagctggcaagaagcatcagtccttccagcagtcacagctctggggattgtctcagaggcctttgtggccctactgggccctacagaactaatggtgtttctcttctctctccaccttgttctcaattgtgtgtgtgtgtgtgtgtgtgtgtatgtgatatttgtttttgtgtgtgcacagatgtgtgtacatgggtgctcacatgcaggtcagaaagtgatcttgggtatgttcctctcttcctcttgaccttattttttgagataggatctctcactgagccttaaactcactgattcagctagactggccgaccaatgagcgctaggatccaccatctccatcccagcgctggggtgggagatgcatgcttccctggccagcttttcatggatgtcagggatctgaacttacatcctgatgcttgcacgcaaacacgttctacactgagccatcttcctagtccctctagtgtatttctaacagtctaagtttggagacatctctgcaaatgaagacatagtttagtgagtacttaattccactcacaaaaggaaaggtacagtgttctgtcttagtttgcttctctgttgttgtgataaagactgtggccaaagcagattgtggcggacagggtttattttatcacagttcatcactgagggaagtcaggccaggagttaacggtaggaacccagaggcaggaactgaagcagacatcataaaggaatactgcttactggcttgctctccatggctttctccagcttgtttttctagagcatccaggaccatctgcctacaggcgacactgtccgcggactgggtcctcccacatctattgttggagaaaataccccacaaccatgcccatgtgtgatgaaagcaattcctcagttgagattgccctcttaccagataggccaggtttgtgtcaagttgacaaaactagccagcacactgttgaaagttatacaggtaggatcacgggctccctggtgcaacaggttggattgggaaccttggtcccaaaaacttctgatggtatagactttaaagaggcttcttgaatgctgggtgggcccctttccattggtagaaagactatgtaagtaccagaagtgaagccccacctacccagagaaataactcctcagtttctttaccatctctgttgctgtttcctgcaatgacagggttttctcccttaggcttagccatgcagtatgtaggtacacaaaggtgggcgaggcagcccagtctttagacgccagcagggcatgagcaatggagactcatgtttggaacacactagataaagagctcccttgtgtgtggatcccgcagtggaggtggggtactagagacagagggagtgttggagagattctccaagggtcagatccagaagacctcaaaggcccttggcgagaacagacctagaaccagtgtttgtgtgtgttgtgtgtgtgtgaaaagctagcaggaggccttcaagcaaggagggttgggcatcttaggggctatgacattaactcagggcaaaaagcttgtcagtgaggctgagaagaggagacagcgcggcagagaggtttaaaagatagagctaaggagcttgttcaccacctagagagggctcctcctgagcactcctgcttggggaggttgggtatctgggaactactgcagcactaactacaaacggagaggcacaagtgtgtgtgtgtgtgtgtggggggggtagctcctgttctccttgttgggaacaaatactgaacaaaaagcaactgaagggagaagaggcgtaccctagcccactgagctgggaagctgcttcatgaggacctgtggcggcagaagcaggaaacaatcctctcgtatctcagcagattgcaacttagagggctgaggctggaatctgaacaagctatagcctataccacccacctccaagatacccatttctgccagctcggcctcactgtagtaactggagcacaagggtggggttcctcagctcatcatgtcttggagaatacttccagagctgagatgtgtgtgtgtgggggtctgagctataacctcaaggctcatctaccccagaacattcttcaactttcccaaacagcacctatagctgaggaccaagtattcaaggccatgagcctgtcaggggcattccatattcaaactgttacagtggatgtcaaggagatgctgaacaagttgggcagtggcacacagtaggccatcagcttcagacctgctcaccgaggcttctgtggagcacagaagtagaaagaggctgagctagctgtagaccaactcaagttgtgcccagagctgaagtcagccaggagaggatgaagagcaacaacatggagaagagataatgtcccaaagatcatgcttaattagggctcagaggcagatggacttgtccaaaatcaagagtgggcttccagggaggagaggatgggagagacttaggggcaaagtgtgtgcagctgtgtgcctgggaagacgcttattttgaaatttatattaaggacttgaaataacaaaaaaacagcgatggaaatctcatagcatggcatacgaccataacatcatcaagcttgtcaaaatgttttaaaaagtaaatgaaaaaccctcatgatttagaaagtatttaccgaactgttacttctgtcagattccacattagttggctttcggcaaaatatccaagtacgagaaaatattactttagtgttcgtttataactaattgttagttttcttatttgctgtctttcttcccttaaaactctgtacaacagtctggtgtcagtgtgctagctttctgttgctgcaagagaaaaataactgagaaaatccacttaaaggggatttactttgtcttgcagtttcagttcctggctccactgttttgggcctgaggcaaggcagggcacggcagcattggtgatgtgtggcagaggcttccaatccatgacatccagcaagaaagggttggaggaagggagagagaggaagcagagaggagaggtgtgggaggcagagggaagggctggggtaagagcatggccccatgggcctgcttcctctaagtaggtcccaccccttatgtctccatcatctctgaacctatcagtgggtcaatccatcaatgagctcacagcactcacaatctataactcccagcgccccatctctaaattgtaccaggagacagtttttagttatatgagcctgtgatgagctaatccatctggtcaggtaagacgccagacatgagccaattggattctgttttaaggtggaaatcattagcccgttagtcagagctattcattattctcaatgctgaaccatctctgtgtagccctggctgtcctagaactcactctgtagagcaggctggcctcaaactcagaaatctgcctgcctcttcctctcaaatgctgggattaaaggcatgagccaccatgcctggcaatactgacttcttatttatttatttatttatttatttatttatttatttatttatttatttatttatttattatatgtaagtacactgtagctgtcttcagacactccagaagagggagtcagatgtcgttatggatggttgtgagccaccatgtggttgctgggatttgaactcaggaccttcagaagagcagtcggatgctcttacccactgagccatctcaccagccccaatactgacttcttttttttttttttaagatggtgatttttattttttagagaagtttttttttttttttagaattaatttttttattaggtattttcctcatttacatttccaatgctatccaaaaagtccccaatacactcccccccacacttccctacccacccactcccactttttggccctggcgttcccctgtactggggcatataaagtttgcaagtccaatgggcctctctttccagtgatggccgactaggccatcttttgatacatatgcagctagagtcaagagctctggggtactggttagttcataatgttgttccacctatagggttgcagatccctttagctccttgggtactttctctaactcctccattgggggccctgtgatccatccaatagctgactgtgagcatccacgtctgtgtttgctaggccccggcattgtctcacaagagacagctatatctgggtcctttcagcaaaatcttgctagtgtatgcaatggtatcagcgtttggaagctgattatgggatggatccctggatatggcagtctttagatggtccatcctttcgtcacagctccaaactttatctctgtaactctttccatgggtgttttgttcccaattctaagaaggggcacagtgtccacactttggtcttcattcttcttgagtttcatgcgtttaacaaattgtatcttatatcttgggtatcctaagtttttgggctaatatccacttatcagtgagtacatattgtgtgagttcctttgtgattgtgttacctcactcaggatgatgccctccaggtccatccaatactgacttttttttttaaaggatttatttattatatgtaagtacactgtagctgtcctcagacactccagaagagggagtcagatcttgttacggatggttgtgagccaccatgtggttgctgggatttgaactctggaccttcggaagagcagtcgggtgctcttacccattgagccatctcaccagccccaatactgacttcttaagtcttcatttctcttgaaatttttggaagaatgttccacagattggcattgactttaaatttgtgggactttattagtgaacctgttttgagatcttgatcaatgatttagtctttatactaaatcattatgaatggcatacacttctctgccttttcatgttttaggcatagtgtgtttccaggaattgatttattcatttctgttgggttatccagcctgttggtgtacaattagttgatcactgtagctttgtatgatcctttaaaaacttctgtgacatcagctatgtattgttttcattcgtttctaattttttgagtattttttctttttcttatttagtctaattttcaatgtatttacctttccagaattttaagattattacattagttttttctgttccccattttatttatttcttctctgatctttatttcattctttctgctaactttgggcttagcttgtgtcacaggattatgttgctgtcataaaacaccacaaccaaaagccacttagagaggaagggtttatttcaccttatacttccgggttatccatcaccaagggaagtcagggcagccatggaggaatactgctcactggcttactcatcctggcttgctcagcctgctttctcatagaacccaggaccaccttcacaggggtagcatggctcacagagagccaggcccttccacatcaatcatcaattaagaaaacgcaccacaggtgtttccagtggccaatctggcagggacattttctcaattgacatttcctcttcccaaatgtctctagattgtgtccagttgatgcaaaactagccagcagggcttgttctttttaattccttgagacataaagctaattgtatatcttatattattacatttatctattatgtgcatgtaggggtatgtgtgcacacttgtggcatgtgtgtagaggtcagaggatggtttccaaacacacttgtctccttctactacgtgggtcctcagagcatcaggtttcgtgtcaattgtcttgaccacagagatacttttttctgaccacatctttcttctcttttgtataggtacttactgaggtaaacttctgcttcactactgccttggctgcacttgcgtgccctggaatctaaggtgagcttcttgtggactcagccataacatgtctttttgttgtagagtttaatccatttacatttaaggtaattattgatgaggaaggatttattattgctgttttgttaactgtcttatatttatctggtgactctctggtctgacttctccctttgggtgttttgtattctgtattctttaacactgataaacgtggtgtttaattttatgtgtcaatttcagtgggttgtaggatgctcatgacgaactgtgttttgggggtgtgtctatgaggatagttgagttggtggactgaataagtagactttcttcctccttgtgcttgggtatcatttagtccattgagagtcaggacataatgaaaggaggaagaagcagggattagttaacctccttgcttgttgttgccctcttggagttaggatgtaccacttcatatctactgtggctctcacgtctttacagtaagttatgtcactgggcgtttgaagcacatagtaggaggccatgggccttcttattctccataatcacatgaacaattcctcacaatcttaccccaaccccagtcatgatttaaattcgaaatgcctaccacaggctaatcttctgagttcttagtcacctgcctgtggtggcaatttaaagctagggaatgaaacctttggagtggggcttggctggtccatgacgttagtgggagtggtaatgttgcacatattatgatgattatcttcattgttgattggacaaaattaagaatttcccatgggaacaagcctctgaaagtttctataacagtatttctagaaaggcttagctgaacagagaggtctcaccctgggtgtggatgcgggcagtagcatcccaaaggctggggtctcaccagaataaaaatgggaaggtgaagcaagcaccagatttcatctcttctgcttcccaactgtgaacgcagtgtgaccatctccctcccgctcctgccgccacgctgtccctgacatgatgaagtgtgtcccctcttatctgtgagccaagataagtctttcttcccttaagttgcttcttggcaggcatttggtcagagcaatgggaaaagtaaccaatgaagtgaaaatttctggtttcttcaacaactcagttgtgtcctttgatgtttttttttctggaagccgtcctgtgagagcgcatgtgatgttttgctgaaagcagacacttgagaggacacatgatggttaggaagaacatgaatggaaccccactcacagtgagaggacgctcttgcattgctccctcgtgcgacactttgctggtctttgctggttttcactccatagagagaaatgcacccaagaacttctcacaccattcctgccgattctggccactcccactgattctggccactcccactgattctggccactcccactgattctggccactcccactgattctggccactcccactgattctggccactcccactgattctggccactcccactgattctggccactcccactgattctggccactcccactgattctggccactcccgctgatgtgggccgatttggtggatcatgtcaccgctaccaactcctgtgtggtgtttgctactggattgctggcatcctgacaacaaagagtggaattgccccaaggaattacttctgaacaggttcacaatacccttttcctattaaccttcttttcccctacccctggtaggtgggttagaagggaggttgaagcctttaagaacgctaaataaagtaggttttgataaaaatcttaagcctacaaactagtacagaaaattggtaccagaagttgttcattgctacgataaattaactaaccacgtggttctttggccttcagaactagtttgtggaaggaaagtggaagagtttagaactttgggctagaaaagtcttaccactctgaagcagagattagcagttatggccacagaggtttggaaggctagataggggctgagagagatgtggacagtagaggcccaatttgtgagattatggaagggaacaagaattctatcaggaactgggccagaggccatttgtgctacattctggctaagagtctggctgcactctgccagtattctaagaacctcagtgagaccgaactaaaaggtaatggattagtatatttggcagaggaaatttcatggcaggagaacattcaagctgtgtctcgatccctgttcaatgttggtatccaggtccacagcgagagacagtgcaacaagtggagctgaaagacaaggaagatgtgtggcttggcagggaaggcacggagttggatgttgcaaatccagctgcgatcgtcagagggatttgccccattaaaaagaaacctcaagctttgaggaaagcaccccagaggcaagaccctacctactcctgccctcaacttgtaaaaatgaaaatgcatttgaaaggagaggacctgaactgagactgcagctgaaaactgttccctgctcaaaagcagccatgttgacactcagaggctactcccaccttggtccaaggatgccaagtagaatttttgatctggcaacagaacttggtggcattgtccacatggtcttggttttgaaaacatgggagatacacaactgagttcatggggtctcatgccacagttccagagagccactgagaacaaaatgtttggcagagctggactctctggtgttggtagccattgtgtgaagttgtgaaggtgaaacctaaggttcggtggaaaccccaggaccatgggatgcccccagagaaaagctgcaggcacagggtaaagccagcccaagagagaggttttgcaagctgcaggcaggagagatgggtgcttttggttgcctaagctgttgaagtcaagaccaaagccccagacactggacatagagtttcagaatttattattttctctaatggatttttatgcctccatttcccattttggaatgaaaatgtttattctgtgccattttatatagaaattatgtaatttattttgttcttattttttatgataaagaatgtgtatataggtattgtgtctgaatgtacatctacaggtcatatgcatgtagcaccaatggagaccagaggaggttgtcagatcccctggagctgaaattatagatggttgtgagctgccatgtggatgctgggaatggaatccaggtcctttgggagagcagccagtgctcttaattgctgagtcatctctctgtctccataatttgcttttctataattgttcacagttcataggtttttattaagcctcaagagacctaggacttttggacagtgttgggctgttaaagactacaaggacttttacagatggactaaatgggttttgtattatgaaatgtaaatagacttcagggaccaggagtgggatggaatgttatggtttcaagtgatgtgttgggtagaggtgtgatggttaatcgtcatgatcaatgtgaaggaatttaggttgccacagaagcagact

SEQ ID NO: 40 - DNA, 59508 bp, Mus musculus
agtctgcttctgtggcaacctaaattccttcacattgatcatgacgattaaccatcacacctctacccaacacatcacttgaaaccataacattccatcccactcctggtccctgaagtctatttacatttcataatacaaaacccatttagtccatctgtaaaagtccttgtagtctttaacagcccaacactgtccaaaagtcctaggtctcttgaggcttaataaaaacctatgaactgtgaacaattatagaaaagcaaattatggagacagagagatgactcagcaattaagagcactggctgctctcccaaaggacctggattccattcccagcatccacatggcagctcacaaccatctataatttcagctccaggggatctgacaacctcctctggtctccattggtgctacatgcatatgacctgtagatgtacattcagacacaatacctatatacacattctttatcataaaaaataagaacaaaataaattacataatttctatataaaatggcacagaataaacattttcattccaaaatgggaaatggaggcataaaaatccattagagaaaataataaattctgaaactctatgtccagtgtctggggctttggtcttgacttcaacagcttaggcaaccaaaagcacccatctctcctgcctgcagcttgcaaaacctctctcttgggctggctttaccctgtgcctgcagcttttctctgggggcatcccatggtcctggggtttccaccgaaccttaggtttcaccttcacaacttcacacaatggctaccaacaccagagagtccagctctgccaaacattttgttctcagtggctctctggaactgtggcatgagaccccatgaactcagttgtgtatctcccatgttttcaaaaccaagaccatgtggacaatgccaccaagttctgttgccagatcaaaaattctacttggcatccttggaccaaggtgggagtagcctctgagtgtcaacatggctgcttttgagcagggaacagttttcagctgcagtctcagttcaggtcctctcctttcaaatgcattttcatttttacaagttgagggcaggagtaggtagggtcttgcctctggggtgctttcctcaaagcttgaggtttctttttaatggggcaaatccctctgacgatcgcagctggatttgcaacatccaactccgtgccttccctgccaagccacacatcttccttgtctttcagctccacttgttgcactgtctctcgctgtggacctggataccaacattgaacagggatcgagacacagcttgaatgttctcctgccatgaaatttcctctgccaaatatactaatccattaccttttagttcggtctcactgaggttcttagaatactggcagagtgcagccagactcttagccagaatgtagcacaaatggcctctggcccagttcctgatagaattcttgttcccttccataatctcacaaattgggcctctactgtccacatctctctcagcccctatctagccttccaaacctctgtggccataactgctaatctctgcttcagagtggtaagacttttctagcccaaagttctaaactcttccactttccttccacaaactagttctgaaggccaaagaaccacgtggttagttaatttatcgtagcaatgaacaacttctggtaccaattttctgtactagtttgtaggcttaagatttttatcaaaacctactttatttagcgttcttaaaggcttcaacctcccttctaacccacctaccaggggtaggggaaaagaaggttaataggaaaagggtattgtgaacctgttcagaagtaattccttggggcaattccactctttgttgtcaggatgccagcaatccagtagcaaacaccacacaggagttggtagcggtgacatgatccaccaaatcggcccacatcagcgggagtggccagaatcagtgggagtggccagaatcagtgggagtggccagaatcagtgggagtggccagaatcagtgggagtggccagaatcagtgggagtggccagaatcagtgggagtggccagaatcagtgggagtggccagaatcagtgggagtggccagaatcagtgggagtggccagaatcggcaggaatggtgtgagaagttcttgggtgcatttctctctatggagtgaaaaccagcaaagaccagcaaagtgtcgcacgagggagcaatgcaagagcgtcctctcactgtgagtggggttccattcatgttcttcctaaccatcatgtgtcctctcaagtgtctgctttcagcaaaacatcacatgcgctctcacaggacggcttccagaaaaaaaaacatcaaaggacacaactgagttgttgaagaaaccagaaattttcacttcattggttacttttcccattgctctgaccaaatgcctgccaagaagcaacttaagggaagaaagacttatcttggctcacagataagaggggacacacttcatcatgtcagggacagcgtggcggcaggagcgggagggagatggtcacactgcgttcacagttgggaagcagaagagatgaaatctggtgcttgcttcaccttcccatttttattctggtgagaccccagcctttgggatgctactgcccgcatccacacccagggtgagacctctctgttcagctaagcctttctagaaatactgttatagaaactttcagaggcttgttcccatgggaaattcttaattttgtccaatcaacaatgaagataatcatcataatatgtgcaacattaccactcccactaacgtcatggaccagccaagccccactccaaaggtttcattccctagctttaaattgccaccacaggcaggtgactaagaactcagaagattagcctgtggtaggcatttcgaatttaaatcatgactggggttggggtaagattgtgaggaattgttcatgtgattatggagaataagaaggcccatggcctcctactatgtgcttcaaacgcccagtgacataacttactgtaaagacgtgagagccacagtagatatgaagtggtacatcctaactccaagagggcaacaacaagcaaggaggttaactaatccctgcttcttcctcctttcattatgtcctgactctcaatggactaaatgatacccaagcacaaggaggaagaaagtctacttattcagtccaccaactcaactatcctcatagacacacccccaaaacacagttcgtcatgagcatcctacaacccactgaaattgacacataaaattaaacaccacgtttatcagtgttaaagaatacagaatacaaaacacccaaagggagaagtcagaccagagagtcaccagataaatataagacagttaacaaaacagcaataataaatccttcctcatcaataattaccttaaatgtaaatggattaaactctacaacaaaaagacatgttatggctgagtccacaagaagctcaccttagattccagggcacgcaagtgcagccaaggcagtagtgaagcagaagtttacctcagtaagtacctatacaaaagagaagaaagatgtggtcagaaaaaagtatctctgtggtcaagacaattgacacgaaacctgatgctctgaggacccacgtagtagaaggagacaagtgtgtttggaaaccatcctctgacctctacacacatgccacaagtgtgcacacatacccctacatgcacataatagataaatgtaataatataagatatacaattagctttatgtctcaaggaattaaaaagaacaagccctgctggctagttttgcatcaactggacacaatctagagacatttgggaagaggaaatgtcaattgagaaaatgtccctgccagattggccactggaaacacctgtggtgcgttttcttaattgatgattgatgtggaagggcctggctctctgtgagccatgctacccctgtgaaggtggtcctgggttctatgagaaagcaggctgagcaagccaggatgagtaagccagtgagcagtattcctccatggctgccctgacttcccttggtgatggataacccggaagtataaggtgaaataaacccttcctctctaagtggcttttggttgtggtgttttatgacagcaacataatcctgtgacacaagctaagcccaaagttagcagaaagaatgaaataaagatcagagaagaaataaataaaatggggaacagaaaaaactaatgtaataatcttaaaattctggaaaggtaaatacattgaaaattagactaaataagaaaaagaaaaaatactcaaaaaattagaaacgaatgaaaacaatacatagctgatgtcacagaagtttttaaaggatcatacaaagctacagtgatcaactaattgtacaccaacaggctggataacccaacagaaatgaataaatcaattcctggaaacacactatgcctaaaacatgaaaaggcagagaagtgtatgccattcataatgatttagtataaagactaaatcattgatcaagatctcaaaacaggttcactaataaagtcccacaaatttaaagtcaatgccaatctgtggaacattcttccaaaaatttcaagagaaatgaagacttaagaagtcagtattggggctggtgagatggctcaatgggtaagagcacccgactgctcttccgaaggtccagagttcaaatcccagcaaccacatggtggctcacaaccatccgtaacaagatctgactccctcttctggagtgtctgaggacagctacagtgtacttacatataataaataaatcctttaaaaaaaaaagtcagtattggatggacctggagggcatcatcctgagtgaggtaacacaatcacaaaggaactcacacaatatgtactcactgataagtggatattagcccaaaaacttaggatacccaagatataagatacaatttgttaaacgcatgaaactcaagaagaatgaagaccaaagtgtggacactgtgccccttcttagaattgggaacaaaacacccatggaaagagttacagagataaagtttggagctgtgacgaaaggatggaccatctaaagactgccatatccagggatccatcccataatcagcttccaaacgctgataccattgcatacactagcaagattttgctgaaaggacccagatatagctgtctcttgtgagacaatgccggggcctagcaaacacagacgtggatgctcacagtcagctattggatggatcacagggcccccaatggaggagttagagaaagtacccaaggagctaaagggatctgcaaccctataggtggaacaacattatgaactaaccagtaccccagagctcttgactctagctgcatatgtatcaaaagatggcctagtcggccatcactggaaagagaggcccattggacttgcaaactttatatgccccagtacaggggaacgccagggccaaaaagtgggagtgggtgggtagggaagtgtgggggggagtgtattggggactttttggatagcattggaaatgtaaatgaggaaaatacctaataaaaaaattaattctaaaaaaaaaaaaaaacttctctaaaaaataaaaatcaccatcttaaaaaaaaaaaaaagaagtcagtattggggctggtgagatggctcagtgggtaagagcatccgactgctcttctgaaggtcctgagttcaaatcccagcaaccacatggtggctcacaaccatccataacgacatctgactccctcttctggagtgtctgaagacagctacagtgtacttacatataataaataaataaataaataaataaataaataaataaataaataaataaataaataaataagaagtcagtattgccaggcatggtggctcatgcctttaatcccagcatttgagaggaagaggcaggcagatttctgagtttgaggccagcctgctctacagagtgagttctaggacagccagggctacacagagatggttcagcattgagaataatgaatagctctgactaacgggctaatgatttccaccttaaaacagaatccaattggctcatgtctggcgtcttacctgaccagatggattagctcatcacaggctcatataactaaaaactgtctcctggtacaatttagagatggggcgctgggagttatagattgtgagtgctgtgagctcattgatggattgacccactgataggttcagagatgatggagacataaggggtgggacctacttagaggaagcaggcccatggggccatgctcttaccccagcccttccctctgcctcccacacctctcctctctgcttcctctctctcccttcctccaaccctttcttgctggatgtcatggattggaagcctctgccacacatcaccaatgctgccgtgccctgccttgcctcaggcccaaaacagtggagccaggaactgaaactgcaagacaaagtaaatcccctttaagtggattttctcagttatttttctcttgcagcaacagaaagctagcacactgacaccagactgttgtacagagttttaagggaagaaagacagcaaataagaaaactaacaattagttataaacgaacactaaagtaatattttctcgtacttggatattttgccgaaagccaactaatgtggaatctgacagaagtaacagttcggtaaatactttctaaatcatgagggtttttcatttactttttaaaacattttgacaagcttgatgatgttatggtcgtatgccatgctatgagatttccatcgctgtttttttgttatttcaagtccttaatataaatttcaaaataagcgtcttcccaggcacacagctgcacacactttgcccctaagtctctcccatcctctcctccctggaagcccactcttgattttggacaagtccatctgcctctgagccctaattaagcatgatctttgggacattatctcttctccatgttgttgctcttcatcctctcctggctgacttcagctctgggcacaacttgagttggtctacagctagctcagcctctttctacttctgtgctccacagaagcctcggtgagcaggtctgaagctgatggcctactgtgtgccactgcccaacttgttcagcatctccttgacatccactgtaacagtttgaatatggaatgcccctgacaggctcatggccttgaatacttggtcctcagctataggtgctgtttgggaaagttgaagaatgttctggggtagatgagccttgaggttatagctcagacccccacacacacacatctcagctctggaagtattctccaagacatgatgagctgaggaaccccacccttgtgctccagttactacagtgaggccgagctggcagaaatgggtatcttggaggtgggtggtataggctatagcttgttcagattccagcctcagccctctaagttgcaatctgctgagatacgagaggattgtttcctgcttctgccgccacaggtcctcatgaagcagcttcccagctcagtgggctagggtacgcctcttctcccttcagttgctttttgttcagtatttgttcccaacaaggagaacaggagctaccccccccacacacacacacacacacttgtgcctctccgtttgtagttagtgctgcagtagttcccagatacccaacctccccaagcaggagtgctcaggaggagccctctctaggtggtgaacaagctccttagctctatcttttaaacctctctgccgcgctgtctcctcttctcagcctcactgacaagctttttgccctgagttaatgtcatagcccctaagatgcccaaccctccttgcttgaaggcctcctgctagcttttcacacacacacaacacacacaaacactggttctaggtctgttctcgccaagggcctttgaggtcttctggatctgacccttggagaatctctccaacactccctctgtctctagtaccccacctccactgcgggatccacacacaagggagctctttatctagtgtgttccaaacatgagtctccattgctcatgccctgctggcgtctaaagactgggctgcctcgcccacctttgtgtacctacatactgcatggctaagcctaagggagaaaaccctgtcattgcaggaaacagcaacagagatggtaaagaaactgaggagttatttctctgggtaggtggggcttcacttctggtacttacatagtctttctaccaatggaaaggggcccacccagcattcaagaagcctctttaaagtctataccatcagaagtttttgggaccaaggttcccaatccaacctgttgcaccagggagcccgtgatcctacctgtataactttcaacagtgtgctggctagttttgtcaacttgacacaaacctggcctatctggtaagagggcaatctcaactgaggaattgctttcatcacacatgggcatggttgtggggtattttctccaacaatagatgtgggaggacccagtccgcggacagtgtcgcctgtaggcagatggtcctggatgctctagaaaaacaagctggagaaagccatggagagcaagccagtaagcagtattcctttatgatgtctgcttcagttcctgcctctgggttcctaccgttaactcctggcctgacttccctcagtgatgaactgtgataaaataaaccctgtccgccacaatctgctttggccacagtctttatcacaacaacagagaagcaaactaagacagaacactgtacctttccttttgtgagtggaattaagtactcactaaactatgtcttcatttgcagagatgtctccaaacttagactgttagaaatacactagagggactaggaagatggctcagtgtagaacgtgtttgcgtgcaagcatcaggatgtaagttcagatccctgacatccatgaaaagctggccagggaagcatgcatctcccaccccagcgctgggatggagatggtggatcctagcgctcattggtcggccagtctagctgaatcagtgagtttaaggctcagtgagagatcctatctcaaaaaataaggtcaagaggaagagaggaacatacccaagatcactttctgacctgcatgtgagcacccatgtacacacatctgtgcacacacaaaaacaaatatcacatacacacacacacacacacacacacaattgagaacaaggtggagagagaagagaaacaccattagttctgtagggcccagtagggccacaaaggcctctgagacaatccccagagctgtgactgctggaaggactgatgcttcttgccagctccaccaaagctcccctagcagcccaaatggctggagctctttgctatgcatgtgagggaaccacacgaatgtgttggatccagagcgagggtctgccaatgacaggctgctagccaaatccactcctccatctgttaatgcttttgacatgttttaataactgaaaaagcaatatttcatgacacacacaaatcatctaaggggcgggagggatggctaagtggtgaagactacttgctgctcttgcatagaatgcgaattccattcccagcacccgtgtcaaggggctcacaaccaccgggaactccagctccacaggatctgtgctctctcacacacctgcaaatagatggtatacaaagagacacacacaaatatacatataaaaagcaaatttagaaataactctaggaaattcaactgtcagtgacacaaacacagtgattcatttgtagattttctgtggtggtttgagtgagaatggtccccataggctcataggtttaaatgtttagtcaccaggagtggaaccgtttgaaaggattgcaaggagtaggaggcgtggccttcctggaggaagtgtgtcactagagatgggctttgagatctttttttaaattaggtatttttctcatttacatttccagtgctatcccaaaagtcccccataccctccccccactccccattcgacccattcccacttcttggccctggcattcccctgtactagggcatataaagtttgcaagtccaatgggcctctctttccactgatggccgactaggccatcttttgatacatatgcagctagagtcaagagctctgaggtactggttagttcataatgttgttccacctatagggttgcagatccctttagctccttgggtactttctctaactcctccattgggggccctgtgatccatccaatagctgactgtgagcattcacttctgtgtttgctaggccctggcatagtctcacaagagacaactctatctgggtcctttcagcaaaatcttgctagttgtatgcaatggtgtcagcgtttggaagctgattttgggatggatccctggatatggcagtctctagatggtccatcctttcgtcacagctccaaactttgtctctgtaactccttccatgggtgttttgttcccaattctaagaaggggcaaagtgtccacactttggtcttcactcttcttgagtttcatgtgctttgtatcttgggtattctaagtttctgggctaatatccacttatcagtgagtacatatcatatgagttcttttgtgattgggttacctcactcaggatgatggcctccaagtccatccatttgcctaggaatttcataaattcattctttttaatagctgagtagtactccattgtgtaaatgtaccacattttctgtatccattcctctgttgaggggcatctgggttctttccagcttctggctattataaataaggctgctatgaacatagtggagcatgtgtccttcttaccagttggaacatcttctgaatatatgcccaggagaggtattgtgggatcctccggtagtactatgtccaattttctgaggtaacccaatcacaaaagaactcacataatatgtactcactgataagcggatattagcccagaaacttagaatacccaagatataagatataatttgcaaaacacatgaaactcaagaagaacgaaggccaaagtgtggacactttgccccttcttagaattgggaacaaaacacccatggaaggagttatagagacaaaatttggagctgagatgaaaggatggaccatctagagactgccatacccagggatccatcccataatcagcctccaaacgctgacaccattgcatacactagcaagattttgctgaaaggaccctgatatagctgtctcatgtgagactatgccggggcctagcaaacacagaagtggatgctcacagtcagctattggatggatcacagggctcccaatggaggagctagagaaagtacccaaggagctaaaggaatctgcaaccctatagttggaacaataatatgaactaaccagtacccccggagctcatgtctctagctacatatgtatcagaagatggcctagttggccatcagtggaaagagagacccattggtcttgcaaactttatatgccccagtacaggggaatgccagggccaagaagtgggagtgggtggataggggagtgggggggagggtatgggggacttttgggatagcattggaaatgtaaatgaagaaaatacctaattaaaaaaataataataataaaagagaaactaccaaagcctcaggttacatcaaattatcattgagatttgtactctaacacttaactgggtaaacaaaacctttgtgatggatattttagctaaaacagaaccaaaataatcaaattagttgatataatgtacttataatggtgactgaaaaaagacaacatccacaagaacaaaattaaaaacactttaatcatttaaatagaaccttcagtaacatacatatacatacagtaaatccacacagtgtaattgaacagtatatttaattacatcaaattcctaagaattccccaaatgtactcggtgtcatggatgtgagaaggtcactttgaaacacttcagacgagcctgagacagacgaggctacccctacacagacgctgatgagaacacagcctggagatgtcaggcatttgttaagaacacttctagagaatgacccaacagggtcgttcagaagggatacaagtgaccaaccccccagaaagataaaggtatagctaacaatctctttggtcctctaagtcaagtcacactggttttgttaactttaaaataccaagcacaggctacgtacttagcattctacctagaaatgtctaaatagcaaagcaggttaacactgctatcaggttagatttcaaaggaaactcaaaatcaacctgactctaaatatagaaactgctaggaaaaagtagaagtgaaaaaaaaaataaaattaaaaaccagctcttgtcttatcataagctgttgagtgtctaagtggtagataagaccacaggaattcatttaaagagcactatgtcagccagagggagaactcttcattgtaacagctatgatgattgtgtttttgcaggggagcaagaatgctgcgatttgatttggccctcactgccccagtggaggacatggtaactggtacgtagccacacttctcggacagctacacctctggacacacttgtactgaagacaaggcacacaccaacaagaaaagaactagaccgaagtcctctgtgcaccaacggccacagcatggcctgtccagagcagtgggcacagctccctggcctccctcatcatcctatgctctcggcagttgtgaggagctgggaacccacagagctgactgagcggcagttccaaaagatcctggaaataattgcaaaaaatacctcatacgagtttttgaaaatcctttgaagcatctccatggaatagacaaagtaaactcccaagaacttcttacaggagatcagccatgtgccgagtcagtacttataaacttgagaagtaacggctgtccgaaaggatggcggaagtacctgctctccaaatggtgtgatattctcaccaaggcaccgagtcaaccccctaaatgcacgtagctgacatgagaataaactactgcagaaagcgattctcccttctcaaaatttcaaaatatagaaggtgaaaattttgtctttttaactcacagcaaaattaaaggcagatatcccaccaccttccctcagagactagtgttatagctggacagttaatataaagaagaaaatgtccctggtagcttcacatacatgatcaaaacagagtggtgtctgtgggcctctgaacacagagggcaatgctctctgaacccctcaccatctccagcactccaacgttagactatgcccactggaggcagcaaacagcatagtggccatggctccttgaatgcccagtgccctctgctaatgagtcagtgattatgtcaaccaaatgcatgcgttccccctcctcccagcatccctgggggctctgaatggcagcagtcgctgtggatagcctatactcctggcagttcactttaacattgccactaagacggtggcgagaagaaagcggaagctcacccttagttgatcacctttatttgacgtatctatataaataattattaaatacaattcatgatgagacataaagttcacaagtgtaccaactgaaactggaatgtacgactgagacagataacagccgcagcagcggggtctgcaaaccagggctcgagcacggaagctcagctcagctcctgattagtgtgaggaactcctcccgagtcttggggtcttcccggaacacgcccagcatggtgctagtgacagtcttgctgttcattttctgcacgcctcgcattaccatgcacatgtgtctataagaaaacaagctggtttaaaagcagacaggagcagatacaacacttatttcagttaaataaaactcagggcaaaaaattggtctcagttcagttatccagagtatcaaaacatcccctcttaggaaaacatgaacgtttctcttgaatcattttatctcattcggcttttattcctattcgtggctgagtccttgatacatccaaatctggagaggaaagcagaactttcttcctgggtgaatgagaacataagttctttttttttcttccaattttgaagcagtctttattaagtatctaatactgcccaacagatgggctttttagtcaggacaactccttgaaacttcccagctgagtggctgaatgtagttctgaattaaaagaacttcagagggcttgttccaccctcaggactgtggtatgatggcactgtaccaaagagggtgtccagagagatgctcatggacatcgatcatgccaacaaatgcaggggaaagtggtcagtgagtctaagcaacatggcgaagacagacagcataccaaggccaaagcttggggacctccatagcatgggcgaggacgtcctatacaatgtgtataattctcataactcagtctaagtgtgtctagagaccattacatgaggtgaaggcagacacagaaagacaaacaccacacgctgtcactccaatgtgggatccaaaagagttggtcccgtggaactgcacagggcctctgagctctgagctggatagatgggttttgcagttacagctaaacgcagtgagaagtcctgggtgcgtgaggatggcaacactgtttcaaggtagcacctgaatgttttcctgcctagagaaatggcactctgaggactaagccactccttactctggtttaaacgctgctgccctctttgctctcaagacacggcctgataaatacaatcagcagtgattctgtttcctaaaacctcagttaacaatgacattgaaaactagaaaatatctgtctgttctccttataaacagtcttcagttgccctttgtaccaggtcttactttttttctatttaacaaatgtgtgttcatgaaaaagctaaggaaacaggggagacacaaaaaaaatactgctgaccgcaaacaaacttctgcagtgatgcttaggactccaagagccctcacaagagggaaaaaagaaaaagctaggggctggagtggttacgagaacatcaactgacctgaatttggttcccattttgggaggctcacaattctctgtaactctccttttgacctccacaaatacagatacacatgcacaggatccaaataaaattaaaatcagaacaaaaatcttttctatccctggcacctgggtcagcagcgttacttggtcctagagaagctgagcggcactagaggcagaggttggtgttgatgctcctgagtcattatcaaaggcgggtttggacttacgtcgcttcaatcactactccaacgccagcaggctgcaaggcttctgtgatggccaccgcaatctgtttggtgaggcgctcttgaactgagggtgtgacaaagaggtaggtttaaaggccagacacaatggaacattgctgtgtgtgtgtgtgtgtgtgtgtgtgtgtgtgtttctattttgctgatttcatttctttttaaaattttttattaggtattttcctcatttccaatgctatcccaaaagtcccccataccctccccgccactcccctacccacctactccccctttttggccctggcgttcccctgtactgaggcatataaagtttgcgtgtccaatgggcctctctttccactgatggccgactaggccatcttctgatacatacgcagctagagacacgagctccagggggtactggttagttcatattgttgttccacctattggattgcagattgctttagctccttgggtactttctctagctcctccattgagggccctgtgatccatccaatagctgactgtgagcattcacttctgtgtttgctaggccccggcatagagagctatatcagggtcctttcagcaaaatcttgctagtgtatgcaatggtgtctgcgtttggtggctgattatgggatggatcccggatatggtagtctctagatggtccatccttttgtctctgtaactccttgcatgggtgttttgttcccaattctaagaaggggcaaagtgtccacactttgatctttgttcttcttgagtttcatgcgtttagcaaattgtatcttatatcttgagtattctaagtttctgggctaatatccacttatcagtgagtacatatcatgtgagttcttttgtgattgggttacctcgctcaggatgatgccctccaggtccatccgtttgcctaggaatttcataaattcattctttttaatagctgagtagtactccattgtgtaaatgtaccacattttctgtatccactcctctgttgaggggcatctgggtggaagattgcttttttcgatacatgcaaacatgtcctcagaatcatgccaatgccaggaaactgacaaaatccaaatgcctcccagagcagaggttggctgggggattagttcacacaatggatcttgaaatagccacgtggttaggggtgtgaggtatggaagttgtttaaggtgtgttgaacaggaaatgggaaaggctgtgtgtacaaatgagcctgcttttgtttcgatgtaaagggtctggtttgaaaatgtccgtacatgcgtagacacgggaggagcctgaaagcacggcggggcttcctctacaggtttaaaacacaagtttctggaccctccctgggaaggctcgatttctgcgtcacatttactacatttgtaataggggaaatgttttctgttgataaagcttatacctaccttgtagtcgtctactgtagatttctacaatcctagaaaagaagaaatgttttggttagtcacgtgtttaataaaatgaattcagcaaagcctcgtgagacaatgagcttgtagctggaaaggtgggtgtgtggccaggggaaatggcctttggaagcattcaagcagagaacacacctcagctctgctcccatgcccctaaagagaaactgggagaactaatgggccccgagtgtagagctcacttagggcaaacataacgacgggggaataacaaatcttgacgcccccagtcatcaattcaagctgagtctcaggcactctaattaatcatattgttttatcagagcttaaagttcaagttaaaaataaaaaggctatttgttaattaatagtaggtcaactactgaaccagctaaatctattagagtaatcagattagagaagattagatttcttcaggcctttcttcacaaagggtttatataagtatttcacaggattaatgctctcccaaataagaggctcctggccttgcagtgaaacctgccaggtggtagtatggacaacctgtgtgagggcagcaattggcatgacagaatatttctttaaaacattactgtctgctcacgatttggactccattaagagtcacttcttctatgagacagtttagaacacacacacctatacacacctctggcaaagtgctccatcttagctaacatgcacctatcagttgcacagcatcatcacactgaccacccaatccggagacccccatggcacgagtcactctatgtcttgggttcagtggttaaaaaatgtagatttttcgctcctagagaaatggtgactccgaggaataaaccacaggttccatctaaacactgccatctacaccgtgttgggccacagcagcagcagtagtaagcctaaataagacaaaacactggtacaagagagtggaccattgctgtgacagacatgaccgtgtttgggctggagaggccgtcaagcctaatgggctgtgctgagaagtgtaaagacatcgctgagaacaatgcagacaacagaagccaggtttgtgagtgaatccatagctagttatcggggccttcatgtgatattttgaattaagaatctattgtgtctgttaagctggagttgaagactcagctgtgattaacaaaagaccaatgcccctgaagtaaaaccctcactctgctgggaaaatccaaacaagtcagcgagagctgaagaactatctgtgactaagagaccagtgtcatgaaggggaaatgttttgagttatttcctcagggtcagcacacagagctataatgcagaggggcccaaggttgcatctcatgctgacagctgagcttagtgacatgaaagggtcacagaagcagcagaggctctgtactgtgagaggccagaagaggcctttggtgaaggagcaacctcagttgcagcagaaggcccaggattgaaagggtcatggagagaagttgatatctggcagcttgtggcagagtcagagttctgataaaagatcacaggaggctaccaatgaaagtgtgactcagctgcagacacccccacattttggaaatgccagtgccacaggatgaccaccaaggacagtagctgtggcgtgaggccacctgggcctgttagactgactatgtgctatgggtagaaattcagggaggtggaactgctcagacccctggagccaagataggagtcccagacacctgacactgaactttggctctgagtgtaactgtaccctgcttgtgccctggttcttgccctcttagagtaaaggatttccttgtttttaatgtactcttttaaaaaacaaaaacaaaaaaaaacaaaaaacaaacaaacaaacaaacaaaaaacaggagcccacaattgagagactttggttcaaagagaagttggatttttgaagaaaacttggacgaaatgtttagagactgtgggactgagccaactccccatccccacccaccgcactgatcacttcaggccgactgaaagctgcacaggtggtattcattctgccagggctttgggaacacatacctgtgtgcacttcttcctgctcttgataaccaaggatcttgtccgtgccctgacttgccatgtggacagactatggctaagtgctaggtcctgtgtattctcagtgcagttgcttatacatccccacggcacggccgcccccacacaggaccaggaggtcatcacagcctccctcagcgcacctccatggcagtggttgttgacttcgtgtaaagcactaggagtgagcctcactgggtctgaaaatggcattgcaactaacatgtttctgtaacaatcagaacttgtgccactgtcatttgtcaatgagctgagtctgtaacttacctagtcttagcaggctatgtcatcaggagcaggtgactcctgttgacactttacccaggcaacttttcaggttcttctatgaatcatgtctcgtggttggtgagacagtctctctacatatccctggctcccttagaactcaccaagtagaccaggctggccttgaactcagagatcctcctgcctgagtgcggggagtcaaggtgtgcaccactatacctggctcttctatgaatgcaatacatcccaaatgagtgattgctttggcgagtcaacaaggaacactcatggaactgggcaccccatggcaacattaaccattccgtttcctctatgttcacaggcagctttcctggcttcccatgtactgcatcctcacctcagctatgaaaactgagtcatacatttgctgggtgtaatgcctgacccctgcaaagccagtgctcaggatgctgaagcaagaggactgccagttctagactagcctcagctacagagtacggcctggtctcaaaaagaacaaagattcattgaggcttttaagattatcttttttgatacatatacttttatctctaaatattagaatggatccctcagtcagttagatctccagcaatctctgattcaatatttcaacgattagacttcaatttctactctctggagtcttctccattattccaaagaacctgaactttgtcttaaaagctatgggcagtcacaaaaggggcagcataatgaagtctgcacttgagaaagaacattccagcagcagattcaaggacccttagatcagaacagagttggggccttaatacacaacccaggggttgggggtggggataagggggcggggggggggggaccggaagctcagctgtgggaggaggcagtgagaagaggaaggggaaagcacttgacagccagaaggggagctgtgtgaggcaagacagatgaaaagcatggatgtgcgcgagcagtcatgcctgcttaaagagccctggaaatccatgataaaaaggcaaacagcaggatcttcagccattaaggaaatctaaatcaaaactttaaaacttggagcaggggccaatacagtcatctctttggtggagaacaagaaggctcagctggtggtgattgcccatgatagaccccactgagctggtggttttcctgtctgtcctgtgttgaaagatgggggaagatgggggtgccctaccgcatcgtcaagggaaaggccaggctggggcacctggtccacaggaagacgtgcaccacagctgccttcacacaggttaactaggaagacaaggatgctctggctaagttggtggaagctacctcgtcccgttcccccttcaagagaaggctgctgtttccttctctctgaccattgcagtagctgacctggaaagtccatccaagccaagtaagtcaatacctaggaactacaattccaaattcaagatttaattatattcattcaattgttctaaggcaagaaaacatacagctttttggtctgagtttactctagacttccactagaatccaatcaaatcacttctggtgtcttcctgtgacttgaggctttcctgcttgatatttgacttcactggaatggaaaggtcaagcattaaaggtgagcagacaacaaactgcacacacaagattaaaatgaacagtgaggtttcgctaagacatagctttctttattaccccttgatctctaagcattcttatttcttaaaagaaatgggcggttgaacacccaatgccttggtttggtgttccattttattcttaaattttaatcctattagcgcaatggcaagccctcacgctagcaatcagcttctttgtaatgctccatagaagatttagctgtttaaggtcttgtcaccaggaaaggacataaccacgattgtcctcctgtgcctctgagtcgtcgtttatttcatggccccactgggtcactcgagaagtcatctctcatgctgtcaatcatgcaggggtcttcaaggtcttcagaggcctgggggtatggctcatcggtagagccactcacttgcctagattaaatgaggccctggacctgagctgagcaccaaagagaggaaagtaaaaaggccacacctaagcttacagtgctctgtgacacttcttagtatggaagccatcaccgactcagtcttccctggatagactgtgtattacagactcggcaatgccggattcccatgataaaggcagaattaacatccttggtggaaagagaagaccagaaaacctgcacctatggctgtgttgtacaataagcacactgatgatgctgtcactcacagctgatataaaatcaactgttctcactattatttgggagtaagtaactgggggaagactgcttttgctttcttgttgctgtgctagacaccatgaccatgacaacttataaaggggagggtttatctggacttatgggtccatcgccatcacggtggggagacccggcaacaggcagacacagaagctggaccagcaagctgagagctcacatcttgaaccacaagcagagagggcagactaggaatggcacaaggcttcaaaacctcaaagcccacccccataaacacacttcctccagcaaggccacgcctcctgactccccaaacagtacctccaactggggaccaagtattcaaacctgtgagccaacgggaaattctcatttaaaccaccacaggtttatacagattccaagaaagaaatgaacaagatgagggctaccatttaggactatggcaaatctcactataacacaaagccacagagcaatcagtcacagaaacacgtttgttccagtgtgactgaggtcactgtaacctcaggcaagtgaagcaaacttagctttaaatgcaatgactgtagttctttacctacccgtccatttggttcttaatccataacacacacacacacttcatatgcatggacaaatgtacatacacacagctcgaacacagcacacctacctacacaggattcactaactccataaaaacaaattaaaacacataaggacatttaggccaccgtcgtgtggggcctagcagagatctataaataaacctgcacactgacttccagctaaacacaaattgccatacatgcacaacacatcacctcttcttcctaaaatcccaagtaaaggcggtaggaaattctttttctcttaaattgtgttattttttttagtcggggtctctcttcataaccctggctatgctgcagctcactatgcagatcaggctggccttgaactcagatctgcctgcctctttttcctgattaaaggtttgccactatgctcagcttgaaaataaaaaaaaattttttttaattcatgaacatgcaggaaaaagagcagaggaggagaacaggccaagtaaagggaggtgcagccttgtagccacagagccaatgacctagacatggatggacttgcctgccggactgagaaacagaggaaagcaggaagccagagcctcacatgcaggctgatcaaaagtttaaaacctcgtatctcacatgctaacagggtcccaagtggcttggctcctcttactgtgtgacctccaagagtcctggtaaagacaccagaacaccctaacagcttggaaacagaaaacaataatagaaaggcctgcaaaccagtgtaagtgctataaaaactccagaagaaagctacagagtggagatgtagacagattcagaagacacgcaaaaaggtgctccatctaggtcattcatccttaagtatgaccactgtgaaaatgaggaacatggagaagacatataaatacaaggagggtaggaaccctcagttatctcagtgctttctaaactcgaaatgactgacaccagacagaagcaccgtgtacctaaggatcatgggagagccttcagtggttgtggctgcttcctatgaatcatactagagaggaaccctgtgtgtaagcaacaggaaaacccttcacggttctttcaatcacatgaaccacagggttcacaggggatagaaatcctatgatgtgtatgagtgactttccaatacataattgagtgtgcggtagagagaaaccttattatacagcaatgtgtgaaacccttcgctttctttctgtccccttgtaaacatgaatgtactcacagaggagagaaagcttatctatgtcagtaatgttgggaaacactgaccaatccagccgtatttgaaaacgggaaggattcacactggaaagaaggcccagccaaggatagatgcaggctagcagagcacgtccttcctagcacccatgagaaaagacaatagagagactcactgacgtgaagtatgcagtctctagttgtttctgttcaactgctgggcaagacccttggcagaatacctggaagagtgagacaagccaatgcctctgcttgtgtgcagttcactgggaatcagtgtaggctttggagacgtatgatagcttcagaagagtaggccttactgtgagtcttgggatctgttttttgcctgcatgacttacatgtacttcctgctatgctctgggtactattctccatatatgcaaatactctttactctctgtctccccagatagaaagatagtgcagctagactcacgtgtgtgcttcctctcggatctctcaccgctaactaacctcctcttaagatccagggctggactgggggtgacggatattttccagttggggaaaactctacagagaaagctgtgagctcatacctcagtaatgggtttgggggaagagaggaacaggcagtgagggagaaggaggcagagacaatgttagggctgcctatgcaagaacagatctaacttctaagttagatccagaaggtagacattttataatgtcgaagacattttatattacatttttggtgcattggtgttttgtctgcatgcatctgtgtgagtgtcagatcctggagttagagacagttgtgagctgccatgtgggtgctaggaattgaaccctggtgctctctggaagagcagtcagtgcttttaaccagtgagccattgctccagcctggaagaaatcttgagagtcttggcaaataggagcaattctagagacctcatacttacctggcaagtttactgagaccaaggacttgcttgttaggaagatagccaatatggaccttcagggaagagagagagattaccagctaaatgaagacacagaaagcacttcataacaacacaaacagatacaggaagaccctagcatacacacaggctaagtttatcacagtgacaatgggataaacctatgaagcaattccatacatactttcaaattatatgaagaaacttcttaagaacaaacttgttactgaaatggcaaattaaaagtaaacctgttatgttccttagtaaaattcttaattcaaatctgaaaacctgtcgagaaaaactatactcaataaggaaaaaaaaaaaaataggcttgtaacatcacggacagtatagtcagggagactcctttaaatggcaggaactgtacatacaaatgatgttattccttgttattccatggagcaggcccaggtgtgctggaggattgactaactcagcttccacccaagcctagatgcagggccctgagctagcccaccccaacatccacccatccatgaactgttggagtatgtgaagggttaggtccctcagatccaaaactgcaggatctcaatgacacagagcaacagaggaatgtccaagaaatccctgtgagggtccagtactgactgataagtatggcagaagccagatggcctcaaaccggacctcattgcaatgaacattcacaagtaaagctatttgggacaaaagagtatactgtgtgacacatggtgacataccgtgacacagcacagcttccatggcaggattctgtatgtttgtttggttggttggttgagtggttggttgggggttggttggttggttggttgattggttggttgggggttggttggttggttggttgattggttggttgggggttggttggttggttgggggttgggggttggttggttggttggggtttggttggttggttggttggttgattggttggttggggtttggttggttggttggttgattggttgattgggggttggttggttggttggttgattggttggttgggggttggttggttggttggttggttgttttctctggaggggagaagttgcaaggacagaggatgatgtgaagggacagggagatgaatgggattggagtgaatgatgtgaaattcacaaagaatcaattaaaagttttttaaaagtatgcagagagtagatagataatagataagtgggaggatagatagatagatagatagacagacagacagacagacagacagtactaaatactaaagaaggaagtaccaagtgctactggaatataaaatattgataactcccacatgttcctttgcagagctgaaggccagcagggagtaaggtgaatatgggcatatctatgaccctgcaaccccattcctagatacatcccagcagaaatggatgcatatgtagaccaagagaaagttggtgactatactagctttgagagtgaccttgtttgttggttggtcggttggggtttttcgttgtttgttttgttttgactgattggcttttcaagacagagcttctctttgtaagaaccttggctgacctggaactagatatacaagccaggcggatacctgcctctgcctctgggattaaaggtgtgtgccaccatgccctgctcaggctatattgtttttaacagcaagaaaagaaaacaagagcagaattgtggtttatatacaatatacaataatgtatgacaatgaaaatcttcatacttcgtgccatttctgttttccaaccataagaaagtaaaaatattttaacaaaaagcaaagaagatattaaatattcatatatagcctacaagtttcctattggaaagtcaaattagaattaaactattgagagctggcataagagggcattgttattgtcaacattcatgtcctcgaaggtgcatctaatgacaactctgacttatctagcttgcattcgactctctttccctaatgtaaaaagggatagaatccaattaaacccactaataccataacctctggctccagaagccctgcagtcctgcctgctgaggtcacagatgtcatgctctgtgcacatggacctgggagcaaacggctcactcaaagacagggcaaagcttttcagagcagcaggaaccaccttaaagtgggtaagcctaaccttattatcccaaccaacaaacacagtgctaatgatgaaaggtccctgtgggccatctttgggggttgttttcaagacaaagtctctctatatgcataggctggtcccaaagagacatcctcctgcccccacctcatgattgctaatgttatagacatatgccatcacctggcttggtttgctttttaaatttccttttctctttagtttttggtttttgaaacaggatttctctttgtagccctgactgtcctagaactcacaactctctctgtagaccaggctggccttgaactcagtgatctgcctgcctttgcctcctagggttacaggcatgtgaccttactgcccagcttaaatttccaattattaggttagccaaaacagtcaaaaattacctgtgtagactgtaaatattgagaatattaagaatcagttgacagtttgaaatacaattgtcctaatttgagattttcattatactttcttaaatagttaggcaataaggagaacttacccttcctacaaatggaacaaggtgatgctcacacatggagaacatatctatgtccttcacaatcaccatctcgtcatgatcttcatcaaatatagcatcattcaggacatctggaaccgggaaaacacaaaattggttaaatactgaaggatagtaaatatttttaaaataaaaatggaaattagttaactttcccttctaagcaagctgtctctcttccttaattgatcgaaaacattcaggagaaatgcagacttccaaatgcatttgtatcctgagctggaagggaggagggggaagggcatgataaagtgagcggctgtgcatggaggtaaaggggggcgggggtcgactcttcccacaatcacacttcctaacaaaaatgtacaaaaatccacacaccgacaaacttggcaaacttctccaaaattaccaagggaaacgtcaaacttactctaagtggttgccttcataatgaaataaatcctatattctgtatgtgtatgcctctttagggggcagcagtcatgtaagctgtgaacctcacacatatggccaggcagacaagagacagctcaggcaagatgccttaggtttaaaggctgcacttggtaacaatcctttcctcatgtgcaaaggaaaaggttaaccagaggatacccatgggagcactcagctcgcttaacatcctgtgacagcaagagcatcctgccctggctgcagaaagataaagggatatgagctacagtcatctctgtgatatagccaccgtgttgacaacattgtatgcaagtgtcacctgtcactgtcacacatgcacaggaaacccctgatctcacggcttggtagacttgaaggatccggggatacccagtccacgcagtacaataagacaagtgtgggggatgagcatggctttgcagctgcccacagcaattttcccctcggaaaggcaggctatgagtcacggagatagacaaatgcccacccccactgcctgaccttcaaggggctcaggtactgagtcatgcagaagcctctgtttcatcaggtcacttggagtcaccttggattgagtggtaggagtcactaggtggccagcaagaatgggcatgtgcagggtttaaatacagaccaacagggacaagccccgtcattttctaagtaaatagcccttctccggcagcagtcacctatgcagaatactctgccctaacctttggttgtatttctaaaagcaatttaaatatagcttcgtggtgttcccagaagtaccctggatttctctaagagttcagtatcatgataaggcatggacagctcactaaaatccttgaaatcactcgaaatccttgagaaataaacatgagagtataaacacaacaatgcatgtttctaaacgaactaaggaaagcaggggatgccagatatccattttctctggcaaaggaacaaacttttcacgactacacatgttagagtcagcctcaagctaggctaagtaggacccagcttgctgttggaccttaggcaaggcacagtgggaaaaatggcatctctacagtggagaaacttggtaggtcaggggtgactcaaccacttgtaggacataatgacattggataccacccaaaatttacaactgtagtctaatcatcaggaagaggaataggctacactttaagatcactttagcagagttttctagagataagggctcactaacttatctaggctagacttgaaccaatctgcccagcttggctgtccaagtagctgggatgataagagtgtactgtaccatcaggcatggctccatgggcaatgttttgaaaaatcattaaggtcataaaaaacatgaaaaagctgtaaaattgtcagagtagattagtgaaaatatgatagctaagtgcaattaaaactaaaatcagaatttgaataaaacatgttggttaatatcattatgccaatattggcttaagtgttagcaactgtaccatgggcatgagagagttttttggtagaagatagtgagatggtctatgaaaaccctctgtaccatctttgtaattttgtcataagtctaaaattacttcaaaatttaaaaaaggatgatagataccatagataaatagaactgccatgtataactcagtgaaaaacgaacttggtgaaaaacatactgacacataatggtatgttaggtctttgcgtggcataaagtcacacagaaacatggcccagcaatatcggccaatgacagatcacatatgcagtggtatctgaggaggctgtatctcccagccatatcactcttctcagctcagttttgtgcaatctgaaaagacagccaattgacagattattgccctaggtgtgaagttgttcaaggaaaggccaaagtatagtaagtggggcgggggataggtggcttatgggggcagagaagtggaacagattgcaaattgacaaggagaaaatttggggatgatagaaaagatagaggctttttctttaattgtgtgtatgaggatggagtgtgtgctcatgtgaatgcagacacctggagtccacagaaggacacagcatcccctggacctggagttagaggtgcttggaattgaacttgcgtactctggaagatcagcaaatgcccttgaccactggagccatctccccagccactccatgtagttttgacttgagatgatataaatgtttatataccgaaaatcagaccaagaagaagcctaactgtcctccaaaggcaatgctttgtgtagaactgatgctagtattttacctatatcacatttcattaaaatgaacccagactgtaaacttgacctcaccaagtcatttttcttcaataataaagttttccagctatatttacttatagtttgctcccacatatctgaaagctgccatctgtggataataagaacaaagctttatcacagattgttttaatttcctgcctgctatcagcaccaagaaggtaaccctggaaacggggttcatagcatcctccttcctgctgcctgttagtcacaaccacaaaggaaaccagaacctcctgaagttggtctgtccacaccaccactgcccttgtcagggttaagcaaggaagcaacacggttgagcagccatcccgtaagcctcttgcccagtaggactcctcctgaaaatatagtacagcacacatacgatgctctctaagcctcttctgaagcaaggatgtcagacccttccgtggggcccagccacagtctctgtgggtctgggtgggcttgagaatctgatttctgaaaacgcctagacactgtgatgctggtccaccaccactgagagcctgctgtggagcatctcagttgctacccagaaccttcacatcgcctactgttcctgcccacatatgtatgtgcacatttagtacaaacagacctgttttgccagggagaagggcacacgggaaagacacaggaaacttctgtcttgtttttaccaccatcattgagcctgggaatagcattcaaggctagggtgggatatttgattcatcttccatcatgcaaacctgatgaaagatggctttggagccttaaataaaatccatccaaaggacaagaaagatatagcagagtctatacatcctgtctataaggggaacgaacaatggagcccaggcaggcgggggcaacacatcccagggcatggggactcggatcttgcccagaattaaatcatctaaagatgctatcaaagataagtttagcaacaggcagtgatagtgcatacctttaatcccagcgatcgggagacagaggcaagtggatcttcgtgagttcaaagccagccagtgttaagttccaagacaaccagggctatacagagttttgaaaacaaaacaaaacaaaacaaaaattaaaaaaaaaaaccataaatgttcctgtttgagagaaaaaaaaatgtgtcacaggtctaagctttcccagtgtctctgacctcagagaaacttggaaggcccacagcactatgtcatgggttcccctagtaccacagttacctgttctcaaagcttaaggtcacaggataccagaagaagtgccccatctttgggctttggcactccatagtgcccttgtaacaccacgcatcaagacaaagttaaacacaggactccttcagaattcagcgtgggaattctctcccactgcccactaacaatgcagacacctcagggtcctttccctcccctccttcatagcattccagcaccctcaagtgccagccttgcactggtaattcacaactttaaatctatagcctaaaacaggttcaagtctctctctttactctgagcaaaaaagtctacttacccttatctaagactaccctgctgcaaaccggaagcgagtgttctaaagcagagcttattgggtccataggtcctagggaccagaaatgagacaggacccagagcagatgtcctccacctgggacagagtcagctaggggcttttactcaaacatccagctgatccagtgtttcagctatttctcaaacaagtggtatctctgtgtgctcaagatgtccctacagagcaaaagcctcaaggttgttggacttttaatatggtaactcaaagccccaaagtgtcttacattcttaagccaattccatggtcctcgctcaccatgaaagggggaatatattaagaacccagggcaaatacagaagtggatgctcacagtcatctattggatggaacacagggcccccaatggagacgctagagaaagtacccaagttgctgaaggggtctgcaaccctataggtggaacaacaatatgaactagccagtatcccccagagctcatgtctctagctgcatatgtatgagaagatggcctagtcgcccatcattgggaaagaggccccttggtcttgcaaactttatatgcctcagtacaggggaatgccagggccaagaagtgggagtgagtgggtagggaagcagggcagggggagggtataggggactttcgggatcgcatttgaaatgtaaataaagaaaatatctaataaaaatttgaaaaaaaaaaaaaagaacccagtgctttgtcatttcttaattcttctagaagatcaggtgaggcagtactaccaccacatgtaaaatgaaaagataactttagacataccagtaatagtacagctaacaggtacagggtcatgtgtaagctcataccttcctatgttcaataaaatcaaatttacattgcttaatgatgggatatgcttttggttctttttgttttgtttttctttttttttttttttttgaaagtctcatgtaacccaggtgtcacctccctgagtattgggaattataagaatgtaccatcgccaggcgtggtgctgcacgcctttaatcccagcacttgggaggcagaggcaggcggatttctgagtttgaggccagcctggtctacgaagtgagttccaggacagccagggctatacagaaaaaccctgtctcaaaaagccaaaaaaaaaaaaaaaaaagtaccaccatgcctggccacaatagggctacgctctgtgaaacgaatcatgaagcactttatttctgtatgaacaccgtggagtatcctcacacaacttacacacttacatattacatgatgctaatggtgtgtatatttacatgtttatacatgcagtctattgtttttaaggccacagaaaacaaaacacaaggataaagcatagacagatcaacagaatggcgaatagaaggcgggggctctgcaggtacaacgaggcagacttccaaagtgaataggcaggagtccaccctgaaacaacagtcacgtttaacagagccactctggagcacagcggcttactcttagtcaagggctggtgctgcacggagtttgcatggctatgctcctaacctactgggagcacaggagcttagcacacattggtagtgggctctcctgatcgacaggggtttgttgtgttttgtttttgctgctccattacaaccttgtggggtcactgcgatctatgcaaatgatgctgaagacctgggaggcacagagctgcctgtgcttctagttctctctgattccagggcacgctcagtggggtgtgtgtgtgtgtgtgagtgtgtgtttatgtgtgagtgtgtgtgcgagtgtgtgagtgtgtgtgtgtgagtgtgagtgtgtgagtgtgtgtgtgagtgtgtatgtgtgtgtgtgtgtgtggttttgccatgactgcttatgtagagagagttctgttagagcttggtcagtgtttctcacactggtctattccctcacaatggctagttggatattaaatgaaacctcaatgcttttgttttgaaaactgtatggtccaaaacccagaactgagctgtaagccccttctaggctgcctgtgtggcccccatttgtcctctcccagaacctagtgcctgagcctaggcagccccggtctcctaccattacccacctctgctcccctcatattctaccatcctcccgagttcatcagggaccctctggagaagctgtcccagcctcacgctcctataatagtgaggaatttttacgaaagcaagcattttataatccaaattacatttccttataacatttccttactcattatcaaatctgttacctgagacagaactgcagccaggcgatggtggtgcatgactttagtcctagcactgagggaccagaagcaagtgggtctctgtggggaaactgctaattaacgttgaagtccaccatgaccagatagcctctttgctcggggcaatatgggagactcccatctccttctctgatctagtctagtctagtctgatctagccccccaccccatatatatctctacctgagggacctcatgttgcttcatagttcataggaccagtttcctttctcctaacaaaacctgtcagccagcaaccccagccaatgaccttgcccatccctcagtccccccaaactttatgagccttcagtcaccctaagtaaagttgatctgcctactgagtgcgggtccagtgtggcttattcactcagggcttctgaaccccaacccctttcataacctctactccctctgccctcatggactgtatgggcagcggtccactagagcagggctccctctgtcctcatggactgtatgggcagcggtccactagagcagggctccctctgctctcatggactgtatgggcagcggtccactagagcagggctccctctgccctcatggactgtatgggcagcggtccactagagcagggagacccttttctacctcacactcacaccagtgcattacactaaccttgttcactggattgtctggggtgacgtgggctcatatccacaatatttggcataatatggtagtaggttggtaggggtggggagctaggatatagggcagggatacatacagttgcatgtctgcttcaattagcagatgctgcaagatccacacagtgtaaaatactatacaaccaaacatctgcctttacaggtcgttattcttctaagcagtaggtaacttttcctgggtttcattctttctagtgtactagatccagaaatttagtgtgatgccctgctttctcttttctttgacttaacattggtttctgaaagaatctttgctacctaaaacctgcagtctgttttatggcaacactggataatggctttttgaaattgagggggaaaaattggagcatctgtaaacagaaatgccaaattattgatagtcatcgttgctgcttcacattagtatgagactgatgcagaaggaagcccattcttcgtgttcagtgctggggatggggtggggagggtagaaagggtgctttttcttaaaacgaaaataattactgctattttaaaatgtcttgattattgaatgtgagaccctctgacatgatttgagaagctgcacacataggcagagtcattttcctgtttacattctttgtttgtttgggggaaattggtagggatctaattactgttcacttcattgttgtattgcagtaaaagatttaaaaaaaaaaaaaaagaacagggagacccatgggtctctatgagttttaggctagcctagtctacattgtggaactctcagaaggaaggaaggaaggaaggaaggaaggaaggaaggaaggaaggaaggaaggaaagaagggagagagagaaagaaagggagagagagagaaaggacagagggaaagaggttggatatgttgagttattttatagtaaaaaaaattaaaattggataaacaaatgctttaaaatttgtgttttgctgaaaattctttcttccagggtatattaaatatttgagtttttcttgtatttatacttttttgtgggagcttattgtttttaattcaagtaatcgagaactggcagtgttcgccagacctgggatttgcttggactgttaaagagtcaaagtttcttttcctttttattgtataccttgcaaagttttcctaatatttacattttggtgttcagacatttttcttcggtgaagcacgcatttctcctatccgttgtccctaattaacattaacagctgagcaccctggcactgctaactgcttccttcctggacagcttcttcagcttgaagggcttgcataacgcccatcagtcatacactggggagactcaagactggaacacacgaagtggttctgagtcaccaacccccaacaacacaccagtgaccttaccagcgggacttgggcgtgtggctttaattagagaaacaactgcttgcccagcttttgctttggctctcgctgggggaaagaagccaacacggaagcagtccgaggttctgggctgttgcatggtaactgtgctttaagacactgctgtggaccaagggcttctccggcatatgtttactgggaagcagtgtgaacggcaagaatagacacagcagctgctgctgcaagactggacccccctgtctgtctcactgtgctaagtggagaaccagaagcaactgggctgacagaaccggcaacagaccggaatagatgagccctgagcagtccactgaggagctagtctcggttggacaactctgctagggctgtgtggagcagcatcagagcctgcatggagtgacttcaggaggagctggcaggcagggttgattacagggctgggcatagttcatactcttgccattttctccatacagtggatggtgagatgagcctggagctctctctgagctacgtacagtggctgtcacagtattttcaacttatttgaaaatccaagcatgttcttaaaaaattaaaaaatatcaaagtacagttgacccatgaagttaaactgtgttaattcatttatgtatgggttgcttaggatattggtgacaatttggggtgggaggacatcagaatcaggtatcttagcaacatttgtaaaaccaaggtatgtatagaatacatcccgacaggagtctgctctaatcatttactatcatgaaatatgcataaatccatttttaaagtaaatacctggggtagagaggaagctcagttggtgaaatgctggccgtacaagcctcaggactcagttcagatccctcaaaacataaaccattgggcacgggagccataaccagcgctgggatgctgttgggggttggcctgctgctacataatgcaatgctaggtgtggtccctaagacctggttgccccaaagacaagaagagtccactcttaggcccaagtgacactatgtgacctggcccctccccaaagttatttctgattggtgaataaagatgcctacagccaacagctgtgcagaattgaggtaggccggcttggggttcccaggcttggggtaggaggagaccacgaggagagagaaaaggtggaaaaaggagaaagacaccatgagttaggagtcaagaaagcatggccatggggactggccaactggagttaaaatgaaactatgtaaggacttaactcagggttatcagtcggaaatagattttaatagcatagagggtagatatctgtccagcactagtactaataaaggcttattataaacataaaggtcatgtgggtcatttatccaggaaatgaatgatcaaagacagggtagacaccctggattgaaattaaatattttctaccataggaaggtagaggcaggaggatttccagggacttgctagccatctagacaaacagcgagctgcaaattcagggagagacactgccccagttatccagggcactaagtcagtatgaacccctggcctccacacacatgcatatgtatacatacacatgcttttactgtgcacagagtgcagcttcctctagacttatgtatcatagcacacactgtgctgtttgtcatcaaatgcaaataaatatttcagtattaagtcataattggaaaagcatcaactgttgggctggtcatactagcgggtggtagggctgttaactagcatgcataaggccccgggtccaatgtctgacaccacatactagtgaactgtagaactaccgtgatttcatagctgcctttcactgctactgtctgtctcatctgctaatattctccagaagttcctctctgttgtaagttgtatctataacatggtaaaaattatcttttagtttataagtgtttttgctacatagaatacataacacatgactagtgcattaatctgtttgctattagcaaggctgcctgccaagagcagattatcatcttcagaagacttgaaagttacacatgaactgattctataggagctggtgcccgacactagcattgcccagtgacagctgtggcatgctgcagagcatttctagcctcacccatatccctcactaaactgtaaggcaatgggtatttaagtcatttccacgcagtacctaatcttgaatatatatatcatgatttcttatggtctcaataatatagtatcaaatttctgtatgtttgccaatccaacaaaagaccaatgtatctataggtaggacctgtgtgcttctctcgtggagagtgaggacaatcacatttcctggtgtttgcagagccctttggaattagcccctgtagaatcagtccatgtgtaactttcaagtcttctgaaagatgataatctgctattggcagacagccttgctaatagcaaacagattaatacactagtcatgtgttttgcattctatgtagcaaaaacatagaatttttataaaatttttataaaatttacttcgctttaaacaccttggcagcttccagttttgtggtcacatttctcccaccactttccagcatctcatctgacattatcagccccattgtcatcagccccctgcccagggcatgagtgtgtcttcccgcttatcatttgactcacttgtgatggtatccatcacatgaaaattcttagttgacgtttgtcacattttatggtttctagattaagccatgattaagtagtcttctattacagaattagacatctaaaatcataagcttttttatgttttaaagctttctgtacttttaaaattttttaccagagttatatagctcctttttaaagggacacaagagttcctcttagaatttcaactgataaatttaaggaccaaagatcattagtccgtcctttctagtaaataccagatgtaggcagtcaccaacagatcctaaatcggtaggtgacgggctggctggaaactctaattgatgagatcagctgagacactttaggctgattgagcttgatgccagaaaagaaagacatttgctgagctgccccagagagaatgccatgcttccttctatgcaacagtcttacctacacttgaaggtttttgttttggaagagcaagcttctcaacctgataattagtgcaatacaagaaacaacgggctcacgaaagactaaatcttggggataaaataagcaaaggctgatgcggtagattctgcaggactgatgggccgtttcttcagcaactaaaaagtcaaatgtgagagacctagaagatgctcaaggatgagactggagagatggctcagcggttaagagcaccgactgctcttctaggtcctaagttcaaatcccagcaaccacatgttggctcacaaccacctattggtggagagtctaccagaaacatctcccttcacataacacggaattaggatccacgcaatccagattcctaattgcaaaaccagtaattagacatcagccctctcctggtcaattctggtaccgcagccttattcaccgaaacactaaaaactcaaatgcaaacctggagagatgccagggtgtggaggagtttctagagccagacaaagcaaacagcaggacaagaaaggagaggaagaaagccaagtaaattagtacgacactgtcatcaactgaaagccaggtcacatcggtgctcctgatcctctcagctctgctgcttgtcagccaccatctggagcaagtgttccctgagtcttgtttccttgtatacaacatgggaatattacatgctctatagggctattatgaagataaagcaaggtgacacctgtcaagggctcaagtcagcaggcaaagacatcagacagtcaaggcagcattgaagcctcgcttcatgctgtcatctcccggcactgaccaagcaccctccctaccggctatcatcacacttctcttccccatgactggctgtcttttctctaaaggccctcccgggagggcttgaaccatgtccagcttcactcattcttttctcagcactctgcacaatgcctggaacacagtaagtgcctccaagcctggtggtacaaacactcaatctcagcattcaagagggagaggctggtgggtctcagggagttccaggccagcctgatctacagagtgcgttccaggccagccagggctacacagagaccctgtctcaaataaataattaaacaagtaaatagaaacactggtaaaattcccagttaatctcatgaataaatatttagtactgctttgggttgacttgtactctaccaagaaaatcctgttgaagatctgggtgcctctgaatatgattttactacgtatggtgatgctccaggtgtaactcagcaaattcagacgaggcacaccacagtgtccagagacaacaaaagcaaggacactggcaggggtagagatcagagcaagtgatgacttcaaaccaaggaagatggactgagttctacaaccagaaactgggaggaggcatggaaggtctccagtatagtttcagaggaagctagggttttcagacttggcatccagggctgtaaaatccccagcttaaatccccagctgtagtacttttctttggcagcctgagaaactagcatcagtagcaatgctgtggcagtggtttgaatgagaatactttgccctgctcctatgtaggctcatgtttaaatgcttggtccccagttcgtggaacctttttggaaggattaggaggtgtggccttgttggagaaagtgtgactctgggtgtaggcttggcgattaagagcccatgtcaggaccagtctgttagggtgtctgtctgtctgccctctcgccctctctctgcctccagagagaaaccagccactgctctagtaccatgtctgcctgcctgctgctacactcactgccctgatggtcatggattcaccctctgaagctataaagctaacacttaaatttcctttataaattgccttgatcatggtgtcttcatgacagaaaagcttgtctgtcatgccagtgttgcatgcagtacctgcacctccccatttctggctttttgccccttgtcttgacagctctgatctacataaactactgtagcaacaaatttcttgtttcctctttattcagtgttcttcctgataacaaatatgctctatttaataattcactaacaaaattaacagaagttattagtgagtcaagatttaaatgagctacatattcatgtttattcagtgacatttcagcccttaagatgaactggggtgtgtgtgtgtgtgtgtgtgtgtgtgatatcatttccctcagttcctcatctcttaagacagtctctctaccatgaacctggagcctaccagtttgactagactaggtagccaggtagccagcaagccaacagggatcctgtctctacctcctcagtactaagataaacacaagtatgccaccttgccttgctttcttatatggatactgggaatcaaacttgggtcttaatggttattcagtaagcacattatcaactgggccatctccacaggccctataatatatatttctaaaacaagggcatgaattactcttcatccagaatacaagagtgtgtactattcttctagaggacccacgttcagaccctagcactcacaactgcctactactacagcctcaaggaatgtgacgccctcttctggcttcatgtgtgcatgcgctctcacttgctccctcctcccctctcgcttacatataattaaaaagtaaaataaatcaagaattttatttcttatctaccttgacactttagctgtcaccgtttgtagtccatcaattgtcttagggttttactgttgtgaaaagacaccacgaccacagcaactcctatttataaagaaaaacatttcactggggctggattccagtttgaggtttagtccattattgtcattgcaggaagcatggctgcatgcaggaagacatagtgctggaagagccaagagtcctacatcttgatctgcaggcaggacactgtgtgccacactgggtatagcttgagcataggagacctcaatgcctgccccatagtgatccacttcctattaaggccatgcctcttagtagcgccttttctatgggccaagcattcaaacacaagtttatgagggctatacctattccaaccaccatatttcactccctggcccccatagacttgtagccatgacataatgcaaaatgtatttagtccaactttaaaagtccccatggtccccaggttcaacagtatttaaaagtccaaagttcaaagtctcatctgagattcatgaaatctcgtaactgtaaccccctttaaaatcacaataaaaaagcagatcacacacttccaagagggagaagcagcatgctgctgtcaacaaagctaaaaagaattggagatctggagagctgacagacagacatggagatgcagttttgagtttatccggtatttcctcatcatgttcctttctgcatttctggaatggcaattatatcctgcaccactatatgctggaactatgtgggaaagaccctacttccatcttgtgaaaaggaattaaaagaacagtttaggtcaaggtgtggttgtaaacacctttaatcccagaggcatgcagatctttgggttcaaggtcagactggtgtacagaacaggttccaggacaggcaaactagacagaaagttggtttagatgctattaagagagtgggccatgttccaatcccagaaagcagcagaacttggcagcttcagccacacagttctggctttagagtcaatgatagaaggggttatggaattgccctccacaactaagaaaagccactgaggccaggtgtgtggcaggggtgtccctgcaaggaggccaagagaggccactgtgggaagctgtgaaggtgaagcctagattgccttggaaacctcaagaggttagagatgccaagagtcctaggatacacactgaggaaagctgctagcccacaagctacagtagtgacaaccagagggagacttagtatgcaggcagccctgtcacagatgaccagagtcactcccatggaaagacaggcactggaaagaggagaaaggtgtgacagggaaaaaggtggaaaagtgacaaacttcccaggggcaagaaatgaacagaatccagaagcgaagggaaaacatgcagagtatcaagtaattaaataatttctgccataagtcaacaaagaattaataaagcaccaggcaaacaaacaatataaatacctatgtttgtccacaagcttttaaaaaaaaaatatcaggctctctagggctggctcagcttacatataggatctggtggaatggcagcacccacgtgctgggtcacacgtctgtaactccagtttcaagggatctgatgccttcctctagcctccgagggcccctgtgtacatgtggtgtacatatgtacaggaagacaaaacactcatactgtgaaataaaaaaataactttatggaaattattatgaaattgttactttttttgaaaaattagggttttttgttttggtttggtttttggtttttttaagacagggtttctctgtgtagccctggctgtcctggaactcactctgtagacaaggctgacctggaactcagaaattcgcctgcctctgcctcccaagtgctgggattaaaggcgtgggccaccatgcctggccaggtttggttttttatcaagaatccagcatggatggggagaggctcacaagccccacacctaagtctcttatctcagttgatggcttcttgggagagtcggtttctttaaggatgttactcccagcaggccaaacagtccagtggatggccacataaccatgaacatatggacgccataggtttcgcaaatttacatttataaatatacatttattaaaacataaatataaaaatttaaaggcagaaagttgggaaggggagggcaggaaggaagagtggggcacagaaggataaaagaaaattaggaggggtgaggcggaaatctgatctaaatacattgtatatatgaatggaattctttgttgtttctgtgtagccctggcagtccttggaactcactccctagaccaggctggcctcgaactcagatctgcaagcctctggtgggataaaaggtgtgctgctgctctcaccactcaggtatgaatagaattcttaaactaataaaaacatatttaaaactaaacatttaggggagagatggttcagtggttaagagcactgggtgttcttccagaagatctgggttcaattcccagcacctatgtggcagctcacaactgcaattccaagagatccaatcccacatacagacatacatggaggcaaaatacaaatgcatatgaaataaaaataaatacaagttatacaaaaattaggttattaaacatttaatctttactatactttattacatgtgacaagttgatcttactcagtccacacctctctctgtccacatgcctggtagaaaaatgcactgattcatcttgctctattgcaacataaggaagtgtctaccaaccagcggctagactacctgcttcccaccatgtgtaacgtcccacttagcttcctcatgtggataaaagaatgacacttcatgtcaaagttcagggttacccaaggccattccattgaggcagccacagagtagctcacacctttaaactcttcattccagaggcagaggcaggcagatctcctagttctagactagtctggtttacctatatatctggctccatgccagcaaaaactatatttaaaaaaaaaaaaaaagccaggtgtggtggcacaagcctttagtcccagcactcgggaggcagaggcaggcagatttctgagttcgaggccagcctggtctacaaagtgagttccaggacagccagggatacacagagaaaccctgtctcggaaacatacacatacacacacacacactcaattgatggcaatcaaaaaaatgttcaaataatcaatgacttttattgtggtagaatatctataaaattcttcatcttaaccgtttgtaaagcatacagttcagcagtaatcacgatgctatgtaactagcacctctgtctaatttctatcactagaaaaggaaactccatagccattaagctgtcactcactagccctgtcttctcagctgacagacaaatcctgtctctaggtcaatggacttcctatgaataaattggagtgggggctgctttggagtccttagactcctttagctgaatctcagctcctgagtaagcctgtgacaatcattctcaaagcaggctagaagctcctctccctgggagtaatgagatgggcaggagggaggggctcagctgaaggatgccagtgaggaccaccttttacgtctaaaagaggcagagtgaacaaggctctgtcaagacactcctcctggttacaccctggacagtcaaacacactaacactcccagatattgaactctcagaaaaaaaatctcagtgactatttgttcttcagtttttgcattttcaaactctgcttttgagatccaaactttcatcatcaaataagtgtaaaatggtgaaactcagactcagaactagatctgggcccacttcctcgaattattaggaagtagtttcgtttcctttggggccccacccttctcaggctctgatctcccacccttcctttgaggtcgaggaaggtttggcagaaataattgttctttctaggacgggtccccatgctctcaatgccttcaggaacagacaggattactacctttcaaagcagtgtggtttgtttttggttttttgttttttccgtgtgtaatggtggaggcaaagacacacgtcacagagatgcccagatgtaaactggaaatgaggcctttgaactcagccaaaggaaccagagcttcttttttataaaggccaacactgcttaaccaaataggcagcaaggccctgctttccacttcctcttcaccctgcctctgtacccacagcaactgcctcgtcactggctgggaaagacttgatgccagcaggctcagactgtggattttaggcggcgggggtggaggtgggtggctaggagggcaaaagcacggaatcccaggtccagtgaacttcaaccatcagagtatcagcgcgggggtggggtggagtgtccctttattctttgagggagcaaacattaaagactttcagcaataatgctagctcaagaaaagtccacacctcaaactgctaggaagtccgaatccagaattgtgccaaattttggtgtaaagtcctaagctagagtagttggatgcaaattccagttctctgaagttccctaccccattacaagtacctaactttacttggctcacggggtgtaacggaaacctggcttcacccaaaagcaagacgcgtcccatcaacaagtgtccacgggatccttgcgggggggggggggaacggtggatgctgcacgtgcctaatcgcgttctgagcgctggggtaagagggtctcacatcccttcccgccccggagttcagtgtagtggctatgcattcaccctccccagagccctgagtgccagccaggagggaccctcgcctccgccaggtggaggctctggggccacagctgggaccgggacctgacaacttggctccctgcgccaaaagtgaagcaactcgggaaagttcccggagctgcccacgcttcctgaagccgcctcctggcgcccagcacaccccggcgcacgcacggacctgagatggtctcctggtatcccttggtgaagtactgcatggcggtggccgccctccagggcgtcttgagcagcccctgccgctgggggtcctcgcccagcgagagcagaatggacgagtaagcggccgccagtttggggaggttcacctggttttcctcctcgctgcggtgccgccctgccttccaggcgtcggccggctgtgcgcccttggcctcgggcggccgggacttctcggcaggcgggctggccccgggccgcggcagctcccgctcggagaacccattggtgcacctgactccccgcggcttctccatggacccggcgcgaccgctcccgagacaccctagggtgctaacaagcgctgcggctcagcttagccggcggccgtaacctgtggccgtcacccggactggggctcagcacctagggacactctcggagtctagggcagtcgccggctggggagccccgccgcgcctctctttttatggcagggcgactcggccggcgccgcgagatattttcattggccggagcctcttgcgtcatggatctctccccgcccctgagccccgccctcctgggtggcccctaaacccccgcagttacacaagacaagcttctggttagaccccctcgacttataaaaggaagaactgagtctacaaaaagccaagaatccggggagctggaacctccgagatagaaacaccgattctccctcactttccaccggaaaagggggcgtgttcgcaaaaatgctgtggtctagttgccctgagaaagatgagctaactaacaggtgaccttgctggggcaggcagggtggagcaaatattctggtgataagcaaccttgtgctcttttttaaatattttttttctttttagcttttttttttccgagattacaataatttcctgtctgttttccctttcttccttccaaaccttcccaaataccttcaccccgcccccccccacaccttgttctcttttacattcagtctctttttttaacagttcttatgtatgtatgtatgtgtgtttctaaatatataaatacaacttgctcagtctggttaatgtctcttgtgtgtatacattttcggggctaatctggtattggtgttctctgtcctagggaagattacctcagtctaagcattcctcggtcacctgtggctctttgtctagggtgagggctcacgagtcgttgtcccacacaccctcacccccatccttgtttatacttctactggagtcattcttttttttgttttttttttttttgttttttttttttgttttttcgagacagggtttctctgtatagccctggctgtcctggagctcactttgtagaccaggttggcctcgaactcagaaatccacctgcctctgcctcccaagtgctgggtgtcattcttttgttgtgctttgttttactttttgagaccaagtctcacagtgcagctctgtctggcctggagttctctatgtcgaccaccaggaaggcctttaattcaaatgatctgcctgcctcacacttccaaacggtgggattaaaagcatgagccctgcctctctcctgctttaaagactggagaagttgtgacttgaaaattgttcagtcgtttaaaatgtatacaacacacacacctgccactctagaaaaccctctggcctctctcaaggcatgagttatggtgcatggcactcaccggagtcccctatgcctagggagataataatatttgtgagctgccagatcgctgctctgctgttttaacctgctctgaccttatctttcacaatgactaggggaagcttgttttctttcattaccctgaatttggtgatcagcaagaggactagggcagctagctacaccctctagccggacagtgtgtactctgccaagaactggtccttggcaaaccaaccactgacaagaggggtgctagagtaatggctcggcagttaagagcacttgcttctcttcccagctcccagcaccttcctcaggcagctcacaaccagctccaagagatccaatccccctgacttctgcgggcacttgaaatcacatgcacaaccccacgcacagacacatacataattttaaaaagaatttgtttattaaaacaaatacttaaactgggcacacgcctttaatcccagcactggggaatctggggcctatggatctctgttgagttcaaggccagcctggactccagagttccaggacagccaaggttacacaaagaagaagccctgccttaataacccataaacaaacagacgaacaaacaaatactttttaaaaaaaatagatgaagagctggagagatggctcagtggtcaagagcactgtctgctcttccagaggacccaggttcaattcccagcacccacaaactgtctataactccagttccaggggatccgacaaccctcacacagacatacatacagacaaaacaccatttcacataaattgaaaataaattttacaaaaagattaaatgaagaaatgggcatttgtgttcttaagatttgcatgactgaaaatcatcttctgaccagcaattaagaattagttgtgagtcctttggccacaaaccttcagccatgagaaagcagtcaccagtctgcaatcacccatctcctgcataatctgccccccaattcagcttccagaacaagcatgtttcttcttttcttcttcctgttggggtgtgtgtgtgtgtgtgtgtgtgtgtgtgtgtgttgggacagggtttttctgtgtagtcctagtattcactctatagatctggcaggcctggaactcagagatctgcctgcctctgcctcccaactgctggggttaaaggggtgtgctgccaccacagagcctaagacttctttagatgggagaatgccctcttcttgccttcagctagtctatgacagagagtttaccaccgcctgtagcttttcacgctgattagcttcctgcctgcagtaaaacctcctactggctaacgtttgtggtagccagaactttgaccttgggaaaattgattagcaagtgaaaaaaaaaagtgttttcatttaaaaacccatttgtattttgtggggaaatagcaggtcgatccaactttaagtacaaagatttactctccagaagttggtacaaactgaaataaatgttactgatcaactgggttgtttttttttttttttctttccctctacctcccaagtgctgggacttaaaggcttggtgactcgaaagggctcttaagcaagtaacacacgctttgatttgattattttctttgagagtgggggagggggacctgtttttcacaggggagggattatgtcataattccaaaggtggattttatcaagcaaccaaattagtgtcttctttgtttccgagagtatcttatgctgactctctgacctatcaataggtgtgagtaagcttgagatcagagcaagcagaagataaaccctgggattgtcttgtactaataaagtctactactgtatattgtaattcatatttattggacatctatctattccaagtaaacattcaggaaaaaaacatgagcattgcttaatctcagagtcatcttcagtctaaaaataggaaaaaaatgggcctgagatgtagctcagttggtagagtgccttcctagcacataaaaagtccaggcttctaagctcagaagcacataaatgagacatgttgacgcaagcctattatcccagcactggggaggtgaaagcagtaggtcaggagttcaaggtcatcttcagctatctagagatttagagtccagtcttggctaaatgagaccctgacaaaataaacaaacaaaacagaagaaatgtaaagcacttgcctggcatgcttgagccctgtgctccatcctgaacactgccaaaatgtgtgcacatatctgtaagtaaagtataagaaatatgcatggggcaggagagatggcccagtggttaagaacactgatggctcttccagaggtcctgagttcaattcccagctcacaaccatctgtaatgggatctgatgtcctcttctggtgtgtctgaagacagctacagtgttctcatatacataaaataaaccttttttttaaaaaaaaatgggtaaatccgttgctactgtaacagagaggtaccaagaaaaaaaagaaagaaagaaagaaagaaagaaagaaagaaagaaagaaagaaagaaagaaagaaagagagaaagaaaggaagaaagagagaaagaaagagagaaagaaagaaagatggatgcatgtcagtgggtcttttaaaagctaattattgaattcctatatacatccaatagtgaattacataaatcaaaaaaaaaaaatgaccaccaaaactgtatgtgcatgtgtgtaaataaagcataagaaatatgcatgtcagtggggtttttaaaaagctaattattgaatttctatatatatcggatagcaaattacataaatcaagcatagctggaagcaacatttgaaggatagctcacatgtttaacaagtaaaaacaaagataccaagggaggtgtgtgtgtctgtgtgtgtgcacgcacaaacctgatttctattcctgtgagccatgtgcatgcatgcatggagagcagagatcaacatcagacagctgcttctttctccatcctgttctttggaaacggagtctctcgctgaacctagagctccccagtttgactaatctggctgatcgatgagttccagcaatcctcctgtctccactccctctcttctgggattacaggtatgtatgcccacacttggctttgtatatgggtcctcgggatctgagctcacgtcctcatggctgcacagcaaacacttcaccaaacaccaagatttctcagccctggggagatactgtttaagtgaaggaaataaataaagatgcctgcaattaaaaaaaaaaaaaaagaatgttttagttagtaatcttattccttctttaaaaaaaaaaaagtaaactttaactactagcttattccttaaagagagtctctaatgaaatttctgttttgatgtcaccaattctcagcccagtctctgaatttgtgctgtgtaatttcaaataaaggcaaggaaaccctgggggtgggggtgggagagagcccgagtagacttctgctttctcttgctttcaaaggccaggtggttaagcagtacaaagccactaacctgtgccatggtttgaatacaaaatagccccactggctcacatgctgaatgttcagtccccagctggtggcgctgtgctgagaggaagtgggtcactggggttgtcttctgtcccgctgtatcttgtcccaggagctcccatgtctctctcttcctctgcttcctgacagccatgaagtgaagagtgccacatgtcacccactctcgggtgcttggacagacagtggacttgtccatcacagaaaacagctcttgcctccaaggaacaagaggtgatttgttctagagaccaaaatgagtgactacagcctgggaacacagatttaggtattttcaaataccatgatttaatgaagtagcaatcccatgaagttttttaaaaaatacttatttatttatttatttatttatttatttatttatttattttatgtatataagtacactgtagctgtcttcaggcacaccagaagagggcatccgatcccattaccgatggttgtaagccatcatgtggttgctgggaactgaactagggacctctggaagagcagccagtgctcttaaccactgagccatctccagccccttcatgaagttttaatagaaactgaactaagaaggtcataagtcaacccatttttaaaattctttgacagatgtactgaataggcaggtcttgataaggtgggggagcttgcccatccccccgcacatgctatctaactgcactcttatttctttggttggtgaggaattaatgacatcgttgaatgctgcagagcatatgcctaatagtcacagagaggttaggccactgacaaagaagggaaataaatgtctgttaagagggacaaatagatggcacaggataacttggctctggacttggaacaagttccccccagtcaggcttgcagaaggctcagtgtaaggggcagttcttcccaggaactttcattcacagactgaacctcctaaaagcacgagcaacatcattctttccccctttcccttgtcctttccattatttttctcagagcagtgcaaagtctgattcataaaacgtgtgatggctagctcaaaacagccatggttagatttttcagagtggttaaagccaccaatatgtcacctgcccatggctagcagatggcctctgatgccagaggccctaaatgtatgccctctgagggcactgatgccactctttctgaacatgaattctatgaagaaccatgcagtttgattttgtatgtagagcaccagtcattgcagacatactaacctcctactgtaccccacagctcagtccactaggcaccccagtcctcagggaggtggatttgaggccttaggctccacctactcacatttgacacctcctgtataaactctcctttgtaaaactggtcatttcagtgaatggcatacggttagatttcccaagcagcttaaagacgcaggaggcagaaaagacgctggaggctgatgtcaacagactggactatttatttcaaacagtgaaggacagacactctcccacaggaaagaggtgtctgtgaaaggggtgggggacacttggagtttttataggaggtttggaggttggggctatgcctaagcctgccatttcttcctctttagatgttccgacctactcagatgggctaccttgggagataggctgacccaccgatagctgtttgagcaggtcagctataccctcgtaagaattctgcttctacaaccgaggcattctatcacctacaatgagacaggcgaagcactatttggtaacagcagggctgtcctgccaccgccccaaggcaatccaaagaaggaagctttgaaatcaccaacattctgtaaacagtttactagcagaacgtaaaccatcggcagggttgcctttaagtagtgatgagagaaaagggaagcatagactaaaccagaaaggcgtgccctgcagaattcattaacaaagacaacccagtgcccacctggaagtatttacataaaggaattgtaacgacgccatatttctaccccaattagaggcccagtagcagacccaatctagcaacttctttcttccaaaagtccaaggaccttttccaatcctatcatttctagggcatgtgccagaaaaagagggagataacagaggtacttggtgtcggaggctgaccagactaggggagacaacctagtcagttgccaagggcaacaggtgaagtggcctcagaaatttagcaacactgattagaaatgtcttcaggtgaacttgatgaaggttctatatttgaaagtcaagctctgggggagactctggctcgtggtggaaagagccacacgctagttttatgttaattcaacacaagctagagtcatttggggcagaggaacctcaagggagaaaatgtcccatcagattggcctgcggtgcattttcttgatttaggattaatgcatgagagcccatgtgggtagtgctggcaagtagtcctgagtcctgtaagagaacaggttgagccagtcatgaggatcacaccaataagcagcatctctcccacaccctctgcttcagttcctgcctccacgttcctgccttgagttccctcagtgtggataacgggctacaagctgtgaggtgagataaaccctttcctcccccacattgtttttgatcgcggcatttcgtcacagcactagaaatcctaaggtaaacacgggaaaggtgtccttatttcaaccctgacaccagaagcaatgaccgtggagtcaagagaatcctcaaacactgctaatccgtcaatacaggaagaatccagctgaagctgtcttctcttctgaaaaggaatggagcaactttgggggagaaattgagagcaaatgaaagcactaggttaatggaaggaagactcacgggctccactccgaatccgaaggccaatcaccagcaaagaagagacataatccaaaccatttgcttgttccagcagaagtactttgacgtctcagtaggatggacacctatctgtggccaccgtgtgacagcgaagccacacacatccagtctgcatagtccctctagcttcctcatggtctgtcaattagacagtggctgtttgtggagaagctctggtttacccagaaaggaagatttgttttctagtcaacaaatgctctcaaatggtaatttaactgtcaataaaataaataaataaaaaggtgccgcagaatttttagcgattcttggaagctctcttgctattgagtgaatcttccccccagttgcctggggaactgcattttaatgtcatgcatcaagcagttcttccctgaatataattgtagtctatctgatgccttgtttaaagctgttcaaatgtttggcttctgctaactattttttggcatcactcatgacagatgatggatccgaagtaaatttaatactttttttttttctaaatcccactaacttgttgaatcagcagaggaggaaacttatataaattgacaatatctttattgccagatggactacagaagatccgtataaatctgtgataatccaatagcttttgcagaaaagcatctccgtggctcattaggggatgctgagcactgagaccaagctgtgaaccaatgagaactctgctttgtggaagtcagtgccagatgcccaatcgaatagttttctgtgggtttgtttgtttgtttgttttaactaaaagatctccagtttttcttaaagaagtcttgttcctagacttgactaagaaaacaaacaccaccaacagtaacaaaccacatatttttcacattcttaacagctatggtggccgtgtgcataatttattcaacaagttattaccgttgccagatggtacttctgacgaaggtctttagaggagataacattcagtgggtaaatcccattacatcagcctttctatagacagcagtgcaaaggctaaactagaagtacatcagccttcctgtattctgaagaccatgagctcaagctcagggctacggagcagaaagacagagagatcccaaggcctcaagaacaatagccctggacatcctccttcaagggttcctattacttcagaaacataaaacaattattgagtccgtggtgggcctgccctttccttcactatgcaggtagtaaggaaagtgtaatgactttgttatgaaccagaaatttcaccctggaataaactctgtgactgccatgtctgtggagaagcggcccttatgacacacatgttctctctgcacatgtgtcccgtgtaagtatcaggaatacgatgatgtaatagaatgaataaaataaatgtgataaggcctttaggtgatccagctccatcaaaaacataaaacttcagccgggcgtggtggcgcatgcctttaatcctagcacttgggaggcagaggcaggcggatttctgagttcgaggccagcctggtctacaaagtgagttccaggaaagccagggctacacagagaaaccctgtctcgaaaaacaaacaaacaaacaaacaaacaaacaaacaaacaccatgaaaactcacaccagctttcgccctataaataaaaacagtgtgagaaaaccttcagctacccctgatgtatcgggaatcatcgactaatgcatagtagagacagaccttatagaaccttggaaatcttggcatgactcctctggagacaaacagatatgaatgtcagcagactagtaagaggttcatgtgtcaccactgggttcaagagcacatagaggctagcagttcctttactcaatccctttcaattcacaaagcaactcacgttgtagagaaacactatacatttgacattatgctaaagtttgtaaacatactgtttctatttaaaatcaagaaaccattcatgctgcagagatgtcttacgagtataagcatcgcactacacccccagcctgcctcagccctgagaaccctgtagtttctaattcccaaatgatattttgcttaccaaagatgtgtctctcatcaaagaagaatgctatgttaactcaaatgagcctttcgtctctgctatgttactttaaaatcccaaagcttcttcaactctctcttggctctttgaaagttctgccctttcatatctgtggaaaagcttaacccatgaaggagactcctgaccaagtacatatcaatccaaagccataacagtttctctgtattctaactacatagcacatactgtcttccaatgccagtgtgatatgtatttgtttatagccatcttgttcctggaatgtgaaggactgctcaaatgcctaattcaatttttcaaaaagaatcctaaaagaagactaagtattttatttctgaaatggtaatcatttctggcttcctgcaggggctcttgggaaggagaatcctgaacctgtgtcttgtagccaggatttcaacgacccagcttgggaggttgcctggcttactgttgctgttccacacagcaacccagggtgcgggagggagtgttggccgcctacagggtctaagtgctgcttctgcgtgcgtgtgtacatgtgtgcgcacacacacacacacacacacacacacacacacgctgcatgcccctcattgagcacttgttgctgctgttacaaggccatcctgaaaagatagtggacctaagttgaggagatggtgggactgattgtgctggtggcccaccaatgccatctctgtcggctggtttaggtgaagagctgaacctgtggcttgtgggccttgcacatgtatgtgcctgagggctggttgttctaggagtgtctgcaaccattgcagagatctctggaaggtgagcctctggactgtcagaacgtgtctgtgaccctggttgctgtccagccagaggtcagaatcacacacttgttgtgtcggctgttctgaggcctggaatagatgttgagcctaggcagcccggactgtgcacagccttgtactatctgcttctgagccctcttcctttcagcttcacttcctataacccccactacacacacacacacacacacacacacacacacacacacacgcacacacacacacatatatatacatacacacatacatatatatatacacatatgtatatacacactcacacatactcacacacacacacatacacgcagacagacacatacacacatacacactccccatgtagcctctgcacagaggcagctttggctcccatgtagaatgaggtaccctctggttctagcaggacagtctgcttctaaatccactgatatgtgagcaagttacctcatacttctgctgcctaagagctgtcagccgtgtctcccccatcatggtgggccttacccctggaaccaggagctaggaggaagccttctccattgaggtgcttgacatgttttctcacagatgaataactgacacccaagcaatctcatgaccttcctctaactctctgactctaaggaacccgcttagagtcctctttctccttgtggtatctcctacagtatcaaaagcaggctttgcatttttatgacatatacaatattgattgtattgaaagaaataaaacccaaggcttgagggatagtccagcagttaagagtgagtactcaccttacaaaggaataaaattcaactcctacgcccgagttagacagtcccaagcacccttacttcagccccgtgggaatccagtggctctggcctcatgggaaccagcacccgtgtgcggatatccaaacacagacacacacttatacatgtaattcaaaatagtttttataaaaagaagctgtgtggacagaggggttcactgtggcacacactgtggcatggtacagcttccaggtggcgtcctctatgccttgcttttgtttatttgtctgtttgttttgctttttattttctttcgggggagaggttgcaaggacagagggtggatatggagggacagggaaacgagtgggactggggtgcatgatgggaaacttataaattgatatactgtttttttaaaaagtgtgtaaacttagaatcaacaagaatgaagtctacctttaaaaccctcagcaaggattggggccttagaatggggggtgtgtgtgtggtggggtgtgtgata

SEQ ID NO: 41 - DNA, 24864 bp, Homo sapiens
ggggcacaggctgtgagggagcccggcacggcttgcagctacagggagaaaagacttggtgctgtgggcctgccttggggctggtggtacagcccttatctgctgccctcaggatctcccggcccctctcgtccaggcccctgcaaccccatgccccagcctctgaggaccaaaggcgcccctgcttgggaagagggggctcaggggagtcgcctgacccggttccaagccaggctgatttaccgttgctaacatcctatcgcacgcatccctctgcctcatgcacccaaccccaaggcctggtacactgcaggccccaaggtcctgtgcgtcctttcaataccctcctcacctgcctcacctgccccccctaccctgactctggctggagaccccctccagggagttttcaaaacaaagggtgtcagtctcctgtgggattccctcacctctgcagcctgcggtctgaaagctgccccatggtgtgtagtgctaaacttccaacttactccaggccagcggtgacagcccgagggcaggaagggcacccacactgagcctcaaacagctaattttgcaactgtaagtccatataattgtcttgaaaagtaatttgtttcaaaaagctaaaaaacgaatactcttgagtctccttctagtaattccccttctagaggtctatcaccaggaaaagatccaaagcactgatattcttcatggagttgtttataatagaaaaaaactagagcttgttcacaaaggggagctctgcaggctgaagatgttgcacctgtcagcggggatgggggcacgcttgctgacgcagcaacggaaaagcatcagtgtgtgaagatgcattttctctctttctattattattatttttatttttattttttctgaggcagaacctcgctctgtcacccaggctggagtgcagtgatgcgacctcatcacaaccacgagccaccatgtgcggccccatgagcaagccaccacgcccagcctttttttcccttgttttaaaaaatcctctatttaaaaaagatgtgcatgggccgggcacggtggttcacgctcataatcccagctctttcagaggccgaggcaggcagatcacctgaggtcaagagttcgacaccagcctggccaacatggtgaaattccatctgtactaaaaatacaaaaattagccaggccgtggtggtgtgtgcctgtaatcccagctactcaggagactgaagcaggagaatcacttgaacccaggaggcagaggttgcagtgggtcaaaatcatgccaccacactccagtctgggagacagagcaagactccatctcagaaacaaactaacaaacaaaatttttatatctacctataattcgtataaatttaaaatacatgcataaaatcataccctttgcaagcacacgtactaactaaaaggaatatattcagcacatagaaatggttgtctaacggaggaggggggagttaataaacagagaggataaaaagaaataaatcagtagagctggaggagggtctcctccaggctgcgatgagaacatagtgagcagaattgcaggcctgcatgacctcaccttctgtgaggagtccggcctcccaagacgctttcctgcctaggtgcccggctcagagtgtcccctacaaggctactggaggagaaccccagaccgagcctcattcaggtgagggggctgcacaccggaggtgggagaggtctgtcccttcccaccctgtgacactgggtcccactttctctctagggggtctcggtttcctcatttgcaaactggagctcataaggtgggccagagaagtttcagtgaagtgaggaatggatcgtccctctgccagggcccatgtgctctaggtcaccctgtcatcacagggacagggaggtcaaggacagtcactcctgaggccagtccgggctgggctgaccacgtggactctcatgcccagattggggccccaatctccctgaagctggggctccagctgtgactcaggggtgggcagaaggggagacagaagcgataggttcctcagcccccagtcccacctgagggcccctttgtcactggatctgataagaaacaccacccctgcagccccctcccctcacctgaccaatggccacagcctggctgggcccagctccctgtatataaggggaccctgggggctgagcactaccaaggccagtcctgagcaggcccaactccagtgcagccgcccaccctgccgccatgtctctgaccaagacttaggggaccatcattgtgtccatgtgggccaagatctccacgcaggccgacaccatcggcaccgagactctggagaggtgagtgtcagatgggactgccagagggactgggtgggaggccaggtatgtgagtggggacagtggggagcgggcagtggggaggggaccgtggggaggggacagtgagtaggagacagtggggagaggacagtggagaggggacagtgaggaggggaccatgggaaggggaccgtggagtggggacagtgaggaggggaccatagggaggggacagtggggaggggacagtgaggaggggaccgtggggaggggacagtgaggaggggaccgtggggaggagacagtgaggaggggaccgtagggaggggacagtgaggaggggaccgtggggaggggacagtgaggaggggaccgtggggaggggacagtgaggaggggaccgtgggaaggagacagtgaggaggggaccttggggaggggacagtgaggaggggaccatggggaggggacagtgaggaggggacaatggagaggggacagtgaggaggggactgtggggagaggacagtgaggaggggaccatggggagggcacagtggggaggggagagtgaggaagggacagtgaggaggggactgtggggaggggacagtggagacagatagccttccctctcagtgaggagggcagggtaaggagggaacgattaggagttgcacaaccatctgggctcgctgagacctgggcaggcacaggcccaggttctgacaagcagagggtgaaaggtttcgttctaggcctgaagggccttacagggcagccagggcactacagcctctaaagtcccagcatctgggatcagggcactgtcccagcttcaaattcccagcatctgatcccctgggaggggccagggagcttttccttccctggaacgctgctgggaggtcatgagcctgcagaaggggtggcgggcaacccagtctggggctgggagggaggtcctgtggccagaggagacggtggaggggctgggggcaccaggcgtgctggaggcggagggcgggagatttggggaccaggctgcacagaacccgtcggaagcagggcgatcagccgggagctgcagaggcctggggggcctctagcccagggcagcctgggaggggcagctgcctgggcacccgggccccgcgaggaggggctggggcctgctgcggggtcgcagatgtgtcccggtgctcggagagggccgcagggcgcgtgggccgtggcgggaggccgcgctgctgggagctcacggcccccgccccccgtcccaggctcttcctcagccacccgcagaccaagacctacttcccgcacttcgacctgcacccggggtccgcgcagttgcgcgcgcacggctccaaggtggtggccgccgtgggcgacgcggtgaagagcatcgacgacatcggcggcgccctgtccaagctgagcgagctgcacgcctacatcctgcgcgtggacccggtcaacttcaaggtgcgcggggcgcggtgcgggcggggcggggcggggccgcggggcgggcggggccgcggggcggggtcgcggggcggggcggggtggggtcgcggggcggggcggggtcgcggggcggggcggggcggggcggggcgggcggggcggccggggcccggcggggcggggcggggcggggaggggctgggcggggcggggcgcggggcggggcgggccgggccggggcggggtcgcggggcggggtcgcggggcggggcgcggggcggggcggggcggggtggggtcgcggggcggggcccgggctaggccccgcccccgcactgagccgcccccgcccccagctcctgtcccactgcctgctggtcaccctggccgcgcgcttccccgccgacttcacggccgaggcccacgccgcctgggccaagttcctatcggtcgtatcctctgtcctgaccgagaagtaccgctgagcgccgcctccgggacccccaggacaggctgcggcccctcccctgcccttcaccctcccacagttcctgccctgactccaataaatggatgaggacggagcgatctgggctctgtgttctcagtattggagggaaggaggggagaagctgagtgatgggtccgggggcttcgcaggaactcggtcgtccccactgtcgtcgcggcctggggttcacttggggggcgccttggggaggttctagcccctgagcaccggagctgcggcccgggtggagcggagcagtcccgggccggcccgcggcgtctcctggggtccttgagtcggacgggcgtttgtgcgtctcccggcttcccatatcgcacaaagattgtcacttcactaagcgtattggaagcgtgtcggggctcagggaacttttccacaaagcctgacgtccgaatcccgggactctggcagctacgggggtccctgaggccggtccctccccgactcctaagagagtagggggtttcctgcccggtgttctctctccggttcctcccatgtgctccctcctggcagagcagtaactttacccgaggggagtaaacagatgcccctaaagtctgcagtaaaggtgcccacgcgcaacggcgtgggtcaatgccagaaaccctgggatcccggaggtcgaggcctccacacagacgggaacccgggctggttacgttccccggcgcaggccgagggtccccgcgttcccgccgcgctcgggccgataaggacgggcggggtgcccggaggctctataaggaggccagggcggcgggcgcggcccccagagcacgtcaggcggcgccatgctcagcgcccaggagcgcgcccaaatcgcgcaggtctgggacctgattgcgggccacgaggcgcaattcggggcggagctgctgctcaggtcggtagaggcggggtctccgggagctcagggaggtggagatgagggttttgggcgcgtgggccgccaacgccatccaaggtccttcgggtgcggatccccgggctctgggcggtgtgggcgctagtgaagccccacgcagccgccctcctccccggtcactgacctggtcctgcaggctcttcacggtgtaccccagcaccaaggtctacttcccgcacctgagcgcctgccaggacgcgacgcagctgctgagccacgggcagcgcatgctggcggctgtgggcgcggcggtgcagcacgtggacaacctgcgcgccgcgctgagcccgctggcggacctgcacgcgctcgtgctgcgcgtggacccagccaactttccggtgaggcctttccggccggggcaatggtgcagcgcgcagccggggtgggggggctctgggggtccctagcggggcagaccccgtctcaccggccccttctcctgcagctgctaatccagtgtttccacgtcgtgctggcctcccacctgcaggacgagttcaccgtgcaaatgcaagcggcgtgggacaagttcctgactggtgtggccgtggtgctgaccgaaaaataccgctgagccctgtgctgcgcaggccttggtctgtgcctgtcaataaacagaggcccgaaccatctgcccctgcctgtgtggtctttggggagctagcaaagcgaggtcactattgttggccagtgaagctcagggacctaaaaggagcctcctagaactctcaaatgcgccccacccccggaggtttgtcctcccatggcgaggagtgcgatggggcagagggagcactgtgatgtggcgggggtagggagggtggccttcgacttcaacccttgaatcgggcttccaaccatactgttcgcaaagcacttccccattcacgcatttattcattcattctccctccatccccacttcctgctgggacctgtagatgctaatcctggccctttttgcagagagatgcagaaactgaggtcccagagccaaatgtgcaacctaattcgttggcccagagcagagggctccgcagacctgttcctttccccttccttcccccatggacacttcctcagtggcaaacctgcgctagcctggttagccctccctgtgaccctgcagccctggggatgaggtcgggaggaagtcctcagtggccacaatttggcagacagagcaggtttagtcttccagcctgctcaatgacaagctgtgcgaccctgggcgtgtcccagagctctcaggcctttacctatcgaatagaaaaacaacgtccaactcacgagatttttgaaataatttttgaaatcataacacagggtgggtgcctgcagggtcgttgccaccccacccctccacccagccccagctgccgtgtctcaatctctgcaggtgcccaggccaaggcactcccttccccaggttccctcttctccctccccaggactgggaagggaatcttagggctccaccccaggcttttcagacaaagaataggggctgaggaaagagtgggaccttggaggtctccaaaccctgaatagggttggctctgggttggccatcctgggtctgtgtggggagcactggaccaggcctggcacccaggtctgacctggcagtcagcaacgaggtctgaagagagctgctggaagtggagccctgactgtgagtcggccaaactccccccagcagtcagtgccagtgacctgttgccctgcactgcctgggaccccagcccggtagtttggagaacttggccccacgttatctacatcccccaactgtttttttgtttttgggggttttttttttttttgctttgtttttgtttttgagataggcccttgctctgacaccccggctggagtgcagtggcacagttttggctcactgcagcctcaacctcctgggttcaagcgattctcctgcctctgtctcccgtgtagctgggattacaggcatgggccgccattcctggctaatttttgtatttttaatagagacacagtttcaccatgttgatcaggctggtctcaaactcctgacctcaagtgatctgccctcctcggtctcccaaagtgctgggatgacaggcgtgagccaccacacccagcccccgcaactgtttacatggataattaacagctttttgtcccaggcagagtttggtgtgaaagcagcttatgtttcactttggaaaaactgtgctcttctccccatccaggaagctgcctgggtctgggccatatgtggataccttatgggtataagctgctcaggaccctgtgtggaagctcaggacaatgccagcgggaaggctaccatgtggagagctggtctctgtttgggcaggactaagagacgcagggcagccttgggcaacctgtctactctcactcactcctcctcccctttcctgtgccaggcacctcctggcaacttgccagccaatgaccctgcatcccaggcataagagctcctactctcccccacctttcacttttgagcttacacagactcagaaataagctgccgtggtgctgtctcctgaggacaaggctaacaccaaggcggtctgggagaaagttggcaaccacactgctggctatgccacggaggccctggagaggcaagaaccctcctctccctgctcacaccttgggtccaacgcccactccagggctccactggccacccctaactattcttaccctggacccagcccccagcccctcactctttgcttccccctgaagcatgttcctgaccttcctctcacttggccctgagttatggctcagcccagatcaagaaacaatgcaagtaggtggccgacacgctgaccaatgccgtggtccacttagatgacatgcccaatgatgtgtctgagctgaggaagctgcatgtccacgagctgtgggtggacccaggcaacatcagggagagctttgggctgggaggaatctagggtgtgggggcagctggccttcctcataggacagaccctcccacgcgttcagggaggtggagcacaggtggcagtagtatctgcatcccctgactctctctccacagttcctgggtaaatgcctgctggtgacctaggcctgccacacccttcccagtttacccatgtggtgcctccatggacaaattatttgcttttgtgagtgctgtgttgacctaaaaacaccattaagctagagcattggtggtcatgccccctgcctgctgggcctcccaccaggccctcctcccctccctgccccagcacttcctgatctttgaatgaagtccgagtaggcagcagcctgtgtgtgcctgggttctctctgtcccggaatgtgccaacagtggaggtgtttacctgtctcagaccaaggacctctctgcagctgcatggggctggggagggagaactgcagggagtatgggaggggaagctgaggtgggcctgctcaagagaaggtgctgaaccatcccctgtcctgagaggtgccaggcctgcaggcagtggctcagaagctggggaggagagaggcatccagggttctactcagggagtcccagcatcgccaccctcctttgaaatctccctggttgaacccagttaacatacgctctccatcaaaacaaaacgaaacaaaacaaactagcaaaataggctgtccccaatgcaagtgcaggtgccagaacatttctctcattctcaccccttcctgccagagggtaggtggctggagtgagggtgctggccctactcacacttcctgtgtcatggtgaccctctgagagcagcccagtcagtggggaaggaggaaggggctgggatgctcacagccggcagcccacacctggggagactcttcagcagagcaccttgcggccttactcctgcacgtctcctgcagtttgtaaggtgcattcagaactcactgtgtgcccagccctgagctcccagctaattgccccacccagggcctctgggacctcctggtgcttctgcttcctgtgctgccagcaacttctggaaacgtccctgtccccggtgctgaagtcctggaatccatgctgggaagttgcacagcccatctggctctcagccagcctaggaacacgagcagcacttccagcccagcccctgccccacagcaagcctccccctccacactcacagtactgaattgagctttgggtagggtggagaggaccctgtcaccgcttttcttctggacatggacctctctgaattgttggggagttccctccccctctccaccacccactcttcctgtgcctcacagcccagagcattgttatttcaacagaaacactttaaaaaataaactaaaatccgacaggcacggtggctcacacctgtaatcccagtactttgggaggctgaggcgagaggatcacctgaggtcgggagtttgagaccagcctgaccaatatggagaaaccccagttatactaaaaatacaaaattagctgggtgtggtggcgcatgcctgtaatcctagctactaggaaggctgaggcaggagaatcgcttgaacccgggaggtggaggttgaggtgagctgagatcacgccattgcactccagcctgggcaacaagagcaaaactccgtctcaaaaaataaataaataaataaataaataaactaaaatctatccatgctttcacacacacacacacacacacacacacacacccttttttgtgttacttaaagtaggagagtgtctctctttcctgtctcctcacacccacccccagaagagaccaaaatgaagggtttggaactcagcccatgggccccatcccatgctgagggaacacagctacatctacaactactgccacaggctctctttttggacaaaaataccatcatactgtagatacctgtgtacaacttcctattctcagtgaagtgtctcccctgcatccctttcagccagttcattcagctctgcgccattccacagtctcactgattattactatgtttccatcatgatccccccaaaaaatcatgactttatttttttatttttattattattatttttttttttttttttgtgacggagtctcgctctgtcacccaggctggagtgcagtggcacaatctcggctcactgcaagctccacctcgcaggttcacgccattctcctccctcagcctcccgagtagctgagtagctgggactacaggcgccccccactacgcctggctaattttttctatttttaatagagacagagtttcactgcattagcgaggatggtctcgatctcctgacctcgcatctgcccgcctcagcctcccaatgtgctgggattacaggcgtgagccaccgcgcccggccttatgtatttatttttttgagacagagtctcgctgtgtcgtcaggctagagtgctgtggcacgatctcggctcactgcaacctccaactccctggttcaaaggattctccagcctccacctcccgagtagctgggattacaggcgtgcaccaccacacccagctaatttttgtatttttagtagagacggggtttctccatgttggtcagcctggtctcgaactcccgacctcagctgatccacccgccttggcctcccaaagtgctgggattacaggcgtgagccaccgagcctggccaaaccatcacttttcatgagcagggatgcacccactggcactcctgcacctcccaccctccccctcgccaagtccaccccttccttcctcaccccacatcccctcacctacattctgcaaccacaggggccttctctcccctgtcctttccctacccagagccaagtttgtttatctgtttacaaccagtatttacctagcaagtcttccatcagatagcatttggagagctgggggtgtcacagtgaaccacgacctctaggccagtgggagagtcagtcacacaaactgtgagtccatgacttggggcttagccagcacccaccaccccacgcgccaccccacaaccccgggtagaggagtctgaatctggagccgcccccagcccagccccgtgctttttgcgtcctggtgtttgttccttcccggtgcctgtcactcaagcacactagtgactatcgccagagggaaagggagctgcaggaagcgaggctggagagcaggaggggctctgcgcagaaattcttttgagttcctatgggccagggcgtccgggtgcgcgcattcctctccgccccaggattgggcgaagccctccggctcgcactcgctcgcccgtgtgttccccgatcccgctggagtcgatgcgcgtccagcgcgtgccaggccggggcgggggtgcgggctgactttctccctcgctagggacgctccggcgcccgaaaggaaagggtggcgctgcgctccggggtgcacgagccgacagcgcccgaccccaacgggccggccccgccagcgccgctaccgccctgcccccgggcgagcgggatgggcgggagtggagtggcgggtggagggtggagacgtcctggcccccgccccgcgtgcacccccaggggaggccgagcccgccgcccggccccgcgcaggccccgcccgggactcccctgcggtccaggccgcgccccgggctccgcgccagccaatgagcgccgcccggccgggcgtgcccccgcgccccaagcataaaccctggcgcgctcgcgggccggcactcttctggtccccacagactcagagagaacccaccatggtgctgtctcctgccgacaagaccaacgtcaaggccgcctggggtaaggtcggcgcgcacgctggcgagtatggtgcggaggccctggagaggtgaggctccctcccctgctccgacccgggctcctcgcccgcccggacccacaggccaccctcaaccgtcctggccccggacccaaaccccacccctcactctgcttctccccgcaggatgttcctgtccttccccaccaccaagacctacttcccgcacttcgacctgagccacggctctgcccaggttaagggccacggcaagaaggtggccgacgcgctgaccaacgccgtggcgcacgtggacgacatgcccaacgcgctgtccgccctgagcgacctgcacgcgcacaagcttcgggtggacccggtcaacttcaaggtgagcggcgggccgggagcgatctgggtcgaggggcgagatggcgccttcctctcagggcagaggatcacgcgggttgcgggaggtgtagcgcaggcggcggctgcgggcctgggccgcactgaccctcttctctgcacagctcctaagccactgcctgctggtgaccctggccgcccacctccccgccgagttcacccctgcggtgcacgcctccctggacaagttcctggcttctgtgagcaccgtgctgacctccaaataccgttaagctggagcctcggtagccgttcctcctgcccgctgggcctcccaacgggccctcctcccctccttgcaccggcccttcctggtctttgaataaagtctgagtgggcagcagcctgtgtgtgcctgggttctctctatcccggaatgtgccaacaatggaggtgtttacctgtctcagaccaaggacctctctgcagctgcatggggctggggagggagaactgcagggagtatgggaggggaagctgaggtgggcctgctcaagagaaggtgctgaaccatcccctgtcctgagaggtgccaggcctgcaggcagtggctcagaagctggggaggagagaggcatccagggttctactcagggagtcccagcatcgccaccctcctttgaaatctccctggttgaacccagttaacatacgctctccatcaaaacaaaacgaaacaaaacaaactagcaaaataggctgtccccagtgcaagtgcaggtgccagaacatttctctcattcccaccccttcctgccagagggtaggtggctggagtgagggtgctggccctactcacacttcctgtgtcacggtgaccctctgagagcagcccagtcagtggggaaggaggaaggggctgggatgctcacagccggcagcccacacctggggagactcttcagcagagcaccttgcggccttactcctgcacgtctcctgcagtttgtaaggtgcattcagaactcactgtgtgcccagccctgagctcccagctaattgccccacccagggcctctgggacctcctggtcttctgcttcctgtgctgccagcaacttctggaaacgtccctgtccccggtgctgaagtcctggaatccatgctgggaagttgcacagcccatctggctctcagccagcctaggaacatgagcagcacttccaacccagtccctgccccacagcaagcctccccctccacactcacagtactggattgagctttggggagggtggagaggaccctgtcactgctttccttctggacatggacctctctgaattgttggggagttccctcccctctccaccacccgctcttcctgcgcctcacagcccagagcattgttatttcagcagaaacactttaaaaaataaactaaaatccgacaggcacggtggctcacgcctgtaatcccagcactttgggaggccgaggtgggaggatcacctgaggtcgggagtttgagaccaccctgatcaacatgtagaaaccccatctatactaaaaatacaaaatcagccgggcatggtggcccatgcctgtaaacccacctactccggaggctgaggcaggagaatcattttaaccaaggaggcagaggttgcagtgagctaagatcacaccattgcactccagcctggaaaacaacagcgaaactccgcctcaaaaaaaaaaaagcccccacatcttatcttttttttttccttcaggctgtgggcagagtcagaagagggtggcagacagggaggggaaatgagaagatccaacgggggaagcattgctaagctggtcggagctacttccttctctgcccaaggcagcttaccctggcttgctcctggacacccagggcagggcctgagtaagggcctggggagacagggcagggagcaggctgaagggtgctgacctgatgcactcctcaaagcaagatcttctgccagacccccaggaaatgacttatcagtgatttctcaggctgttttctcctcagtaccatccccccaaaaaacatcacttttcatgcacagggatgcacccactggcactcctgcacctcccacccttccccagaagtccaccccttccttcctcaccctgcaggagctggccagcctcatcaccccaacatctccccacctccattctccaaccacagggcccttgtctcctctgtcctttcccctccccgagccaagcctcctccctcctccacctcctccacctaatacatatccttaagtctcacctcctccaggaagccctcagactaaccctggtcaccttgaatgcctcgtccacacctccagacttcctcagggcctgtgatgaggtctgcacctctgtgtgtacttgtgtgatggttagaggactgcctacctcccagaggaggttgaatgctccagccggttccagctattgctttgtttacctgtttaaccagtatttacctagcaagtcttccatcagatagcatttggagagctgggggtgtcacagtgaaccacgacctctaggccagtgggagagtcagtcacacaaactgtgagtccatgacttggggcttagccagcacccaccaccccacgcgccaccccacaaccccgggtagaggagtctgaatctggagccgcccccagcccagccccgtgctttttgcgtcctggtgtttattccttcccggtgcctgtcactcaagcacactagtgactatcgccagagggaaagggagctgcaggaagcgaggctggagagcaggaggggctctgcgcagaaattcttttgagttcctatgggccagggcgtccgggtgcgcgcattcctctccgccccaggattgggcgaagcctcccggctcgcactcgctcgcccgtgtgttccccgatcccgctggagtcgatgcgcgtccagcgcgtgccaggccggggcgggggtgcgggctgactttctccctcgctagggacgctccggcgcccgaaaggaaagggtggcgctgcgctccggggtgcacgagccgacagcgcccgaccccaacgggccggccccgccagcgccgctaccgccctgcccccgggcgagcgggatgggcgggagtggagtggcgggtggagggtggagacgtcctggcccccgccccgcgtgcacccccaggggaggccgagcccgccgcccggccccgcgcaggccccgcccgggactcccctgcggtccaggccgcgccccgggctccgcgccagccaatgagcgccgcccggccgggcgtgcccccgcgccccaagcataaaccctggcgcgctcgcggcccggcactcttctggtccccacagactcagagagaacccaccatggtgctgtctcctgccgacaagaccaacgtcaaggccgcctggggtaaggtcggcgcgcacgctggcgagtatggtgcggaggccctggagaggtgaggctccctcccctgctccgacccgggctcctcgcccgcccggacccacaggccaccctcaaccgtcctggccccggacccaaaccccacccctcactctgcttctccccgcaggatgttcctgtccttccccaccaccaagacctacttcccgcacttcgacctgagccacggctctgcccaggttaagggccacggcaagaaggtggccgacgcgctgaccaacgccgtggcgcacgtggacgacatgcccaacgcgctgtccgccctgagcgacctgcacgcgcacaagcttcgggtggacccggtcaacttcaaggtgagcggcgggccgggagcgatctgggtcgaggggcgagatggcgccttcctcgcagggcagaggatcacgcgggttgcgggaggtgtagcgcaggcggcggctgcgggcctgggccctcggccccactgaccctcttctctgcacagctcctaagccactgcctgctggtgaccctggccgcccacctccccgccgagttcacccctgcggtgcacgcctccctggacaagttcctggcttctgtgagcaccgtgctgacctccaaataccgttaagctggagcctcggtggccatgcttcttgccccttgggcctccccccagcccctcctccccttcctgcacccgtacccccgtggtctttgaataaagtctgagtgggcggcagcctgtgtgtgcctgagttttttccctcagcaaacgtgccaggcatgggcgtggacagcagctgggacacacatggctagaacctctctgcagctggatagggtaggaaaaggcaggggcgggaggaggggatggaggagggaaagtggagccaccgcgaagtccagctggaaaaacgctggaccctagagtgctttgaggatgcatttgctctttcccgagttttattcccagacttttcagattcaatgcaggtttgctgaaataatgaatttatccatctttacgtttctgggcactcttgtgccaagaactggctggctttctgcctgggacgtcactggtttcccagaggtcctcccacatatgggtggtgggtaggtcagagaagtcccactccagcatggctgcattgatcccccatcgttcccactagtctccgtaaaacctcccagatacaggcacagtctagatgaaatcaggggtgcggggtgcaactgcaggccccaggcaattcaataggggctctactttcacccccaggtcaccccagaatgctcacacaccagacactgacgccctggggctgtcaagatcaggcgtttgtctctgggcccagctcagggcccagctcagcacccactcagctcccctgaggctggggagcctgtcccattgcgactggagaggagagcggggccacagaggcctggctagaaggtcccttctccctggtgtgtgttttctctctgctgagcaggcttgcagtgcctggggtatcagagggagggttcccggagctggtagccataaagccctggccctcaactgataggaatatcttttattccctgagcccatgaatcacccttggtaaacacctatggcaggccctctgcctgcgtttgtgatgtccttcccgcagcctgtgggtacagtatcaactgtcaggaagacggtgtcttcgttatttcatcaggaagaatggaggtctgacctaaaggtagaaatatgtcaaatgtacagcagagggctggttggagtgcagcgctttttacaattaattgatcagaaccagttataaatttatcatttccttctccactcctgctgcttcagttgactaagcctaagaaaaaattataaaaattggccgggcgcggtggctcacacctgtaattgcagcactttgccaggcttaggcaggtggatcacctgaagtcaggggttcgagaccagcctagccaacatagtgaaaccctgtctctactaaaaagacaaaaattgtccaggtgtgatgactcatgcctgtaaacctggcactttgggaggcggaggttgtagtgagtcaagatcgcgccatcgcactccagcttgggcaacaagagcgaaactctgtctcaaaaaaaaatttaatctaatttaatttaatttaaaaattagcacggtggttgggcacagtggctcacgcctgtaatcccagcactttgggaagccaaggtgggcagatcacaaggtcaggaattcgagaccagcctggccaatatggggaaaccccatctctactaaaaatacaaaaaattagccgggtgtggtggcgcacgcctgtaatcccagctactcgggaggttgaggtaggagaatcacttgaacccaggaggcagaggttgcagtgacccgagatcacaccattgcactctagcctgggcaacaagagcaaaactccatctcaaaaaaaattataaaaattatacatcagtagatgaatgggtaaacaaaatgtggtggtctatacacacaatggaatattatttggccacaaaaagaaatgaagcactgataggatgtagctgcaccctgaaaatatttgacaagtaaaagaagccggacaccaaaggtcacaaactgcatgaccccatctatatgcaatatccgctacagccaaatccatagggaccaaaagcggattagtggctgccggggccagagttactgttaatgagtaccgaggtggcgtttgggatgatgaaaaagttctgacctagatagtggtgatggctgcataacactaagtgttcttaatatcaccaaattttatacctgaaaaatggctacaatggtaatttatgtctattttatcaccttttttaaaacaaaaaagatataaggggtacagcagagtgagtgctgcatatgcatttactattattcttgggttacatcccaggtactcaataaatgttcactgccctgaagaaacacctgctacgagtcaggcacctcacagttgttatccgtttaattctcacaatctgagaagaaactgtcaccctcattttatataataaatgagaaaacagactcgggcaagtgtcacaatagaatcaagaggcagaataaactgacttccaatgccaaatccatgccgaaattcagtgctataataatgtacatggccgggcgcggtggttcacgcctgtaatcccagaactttgggaggctgaggcgggaggatcacctgaggtcgggagtttgagatcagcctaacacggtgaaaccctgtctctactaaaaatacaaaattggcatggtggcatgcacctgtgatcccagttactcgggaggctgaggcaggagaatcgtttgaacccgggaggcggaggttgcagtgagccggaatggcgccactgcactcaccgcacccggccaatttttgtgtttttagtagagactaaataccatatagtgaacacctaagacggggggccttggatccagggcgattcagagggccccggtcggagctgtcggagattgagcgcgcgcggtcccgggatctccgacgaggccctggacccccgggcggcgaagctgcggcgcggcgccccctggaggccgcgggacccctggccggtccgcgcaggcgcagcggggtcgcagggcgcggcgggttccagcgcggggatggcgctgtccgcggaggaccgggcgctggtgcgcgccctgtggaagaagctgggcagcaacgtcggcgtctacacgacagaggccctggaaaggtgcggcaggctgggcgcccccgcccccaggggccctccctccccaagccccccggacgcgcctcacccacgttcctctcgcaggaccttcctggctttccccgccacgaagacctacttctcccacctggacctgagccccggctcctcacaagtcagagcccacggccagaaggtggcggacgcgctgagcctcgccgtggagcgcctggacgacctaccccacgcgctgtccgcgctgagccacctgcacgcgtgccagctgcgagtggacccggccagcttccaggtgagcggctgccgtgctgggcccctgtccccgggagggccccggcggggtgggtgcggggggcgtgcggggcgggtgcaggcgagtgagccttgagcgctcgccgcagctcctgggccactgcctgctggtaaccctcgcccggcactaccccggagacttcagccccgcgctgcaggcgtcgctggacaagttcctgagccacgttatctcggcgctggtttccgagtaccgctgaactgtgggtgggtggccgcgggatccccaggcgaccttccccgtgtttgagtaaagcctctcccaggagcagccttcttgccgtgctctctcgaggtcaggacgcgagaggaaggcgccgcccctccccaaggaaaggcgagggcctggggcacacccccagtgcccagatccaggcgcgcctctttccacctccagcaggtttggggcctcggccatgggggcaccgaactgcgtgcagcctgaccctcccgaatggggtggtaggtgagggccgcgggacgccccgggcggcgggctgcgaggacggccgactctgcccatcccgagggcggctggcttcgccctccccactctgcgccgagcacgcggcccggacccaccgcgagaactccgcacctgcagcgtgaacgcacgcgggcggcgttaagggcccggggctgactcggagcaggttagggaacagcgccccctcccggcgcgagccggtacctgcgcagcacccagccgccgcggctgtggcctggaatcggggacctggggtgccggggggttgtggtgaaggaggtgggaccagccccagcacctagccacgtagctggcgaggtggaccaggaaccgacccagacccctgccgtcacccgacatcactacggagagtgaagcttttttatatttgtccacataaaaccaatcatggtcattgtagaacttccgaaaacaaggcttgctgcaccttcctgtgtatcccaggtccaggaatgggtgcagcacatccttcagctgccgcttgacacgcggcaaactgtgtcatgtgtaaacaagaacaggacatggctgtcatatccaagagcacatgtgtaacacagacatgccacacacacacacacacacacacggggtagaggcaggcctcatccacacccctaacatttgatgcgtagctgttccagtcttctaggcacatgtagagatgcttttcctcagaaatggtattctcaaggtgacactgaggaaaagtggacaggccgggcgcggtggctcacgcctgtaatcccagcactccgggaggccgaggcgggcggatcacgaggtcaggagatcgagaccatcctggctaacactgtgaaaccccgtctctactaaaaatacaaaaaaatagctgggggtggtggcgggcgcctgcattcccagctactcgggaggctgcggcaggagaatggcgtgaaccccggaggcggagcctgcagtgagccaagattgcgccactgcactccagcctgggcgacagagtgagactccgtctcagaaaaaataaaaataaaaataaaaattagctgggtgtggtgcgggcgcctgtaatcccaacttcaggaggctgaggcaggaggatggcttgaacccgggaggcggaggttgcggtgagccgagatcacaccattgcactccagcctgagcgacagagcgagactccgtctcaaaaaaaaaaaaaagaggagggggcggggggaagagccagagaaaatatttgctacatgtggcagataaaggttattatctctactacattagatctccgggcggggcatggtggctcacgcctgtaatcccagcactttgggaagcagaggccggtagatcacctgaggtcaggagtttaagaccagcctggccaacatggtgaaaccccgtttctactaaaaatataaaaactaactgggtgtggtggtgcatgcctgtactcccagctactcgggaggctgagacaggagaatcacttgaaccagagtcggaggttggagtgagctgagattgcaccactgcactccagctttgcgacagagcgagactgtctcaaacaaaaaaaaaaaaaaagaaaagaaaaaatctggcccctagcccacccgtgagccccctcttggatccacgttctagtttctatccttggggtagctcgagtcagtctcacctcaatcatcctgtgtgctcccagagcacaggacctgcggctgctgcaacttcgcgcacaggagcaagcacttggagcccaggaggctcaggggccctgaggaagcaccaggctctcagactcctgtaactaggtgtggacaccctcctgggattacatctggagcatcactgaaggtggaagagccagaccgcatcctccctggagatgtggaggttggagggagctggccctggctcaagggctcagcccacttggtacagaacctacccagaggtgcagatccaagggagcagggggagcagctgtgggccctccacactgttggggagactcatgcccactcaagtccaggggaatttgcactctgccttttttttttttttttttttttgagatggagtcttgctctgtcacccaggctggagtgcagtggtgcaatctcaactcgctgcaatctccacctcccgggttcaagcgaatctcctgcctcagcctcctgagtagctgggattacaggtgcctgccacgcctggctcatttttatatttttagtagagacggggtttcaccatgttggccaggatggtctcaatttcttaaccttgtgatccacctgccttggcctcccaaagtgctgggattgcagatgtaagccaccgcgcctggccatactctgccttttcaaagccactcctacacaggtggtggtgaaggctgcacaacaatgtagatacacgtcgtgccactgaactgtacactgaaaaactgttataacggcacgttttgtgtgcactttactataataaaaaatgttccatcctggctgggcgcggtggctcacgcctataatcccagcactttgggaggccgaggcgggcaaatcataaggtcacgagattgagaccatcctggctaacacagtgcaaccccgtctctactaaaaaaaacacacaaaaaattggccgggcgtgatagcgggcgcctgtagtcccagctattcgggaggctgaggcaggagaatggcgtgaaccagggaggcggagcttgcagtgagccgagtttgcgccactgcattctagcctgggtgacaaaagcgagactccgtctcaaaaaaaaaaaaaaaaaagttccatcctggccaacgtggttctggctccaggctgccacccctcccccaaaggatgccaccccagataggggtcctcggcctgctccagcacctgcctgtcccatgacggctgcacactggggtaggaaacggcctccgcatcctcctctcctccccccaggactacccttaacccactcagggcttcggtcaaggcccatgcgctccccaagcccaaggtaaccctgtgcaggaggcaaaggtggtacaaggcacagcccatccagctagtttggcgccgacagcacccaccaaacagagccatttacctttaaaaaaatcactgccagctgtggtgacacacctgtaatcctagtgctttgagaggctgaggtgggaagactgcttgagcccaggagttcccaagaatatcctgagcaacatagtgagacctgtctccacaaaaacataaaaaattagccaagtgtggtagtgcacacctatgtcccagttacttggaggctggggcaggaggatcacttaagtccaggagttcaaggctgcagtaagccatgactacaacactgcactccagcatgggtgacaaagcaagcatcgtctcaaaaaaaataaataaataattttggccaggtgccgtggcttacgcctgtgatcccagcactttgggaggtcaaggcgggtggatcacgaggtcaggagtccaagaccagcctggccaagatggtgaaacgttgtctctactaaaaatacaacaattagccgggcatggtggcgggcccctgtattcccagctagtcgggaggctgaggcagagggtgcagtgagccgagactgcatcaccgcgctctagcctaggagacagagcgagactccgtctcaaaaaaaaaaaaaaaaagtttttttttaatcgccaaatgttctggagaggcccccttctcttctgttctcctgcagtctgggctgcaggccaaggtggtccctgtgggtggagacaagggccggttccacctgacactacagaccccttcacatgggagggatacacttccagacccatatatctccgagtagccatctttggcgagatttactggtactgcagtggaaaggaaggactcgctgtactgggtgaaaaaagtgaaaacatgggactcctatcgcagactctgacagcagaacctggtgtgggttatttgggaggagggagggaggagggagaaaggaagagctgttgtgggtgctatcagcgaaactgcaccgggggcatgaagctcagtttggtcagcaccacctggcaggtgtaccaaaagcccacccgactgtccctgcacggtagagaggcaggagcgcctctccctgcacggatggtgccccggaggctaccaggggcggccgaggacactgatgctgcatcccaggaggacctgtccttcagctgtaatcagcagacacgggggacaggatggccaggggcacagcaccttttctgtaaaccccacacc

SEQ ID NO: 42 - DNA, 24864 bp, Homo sapiens
ggtgtggggtttacagaaaaggtgctgtgcccctggccatcctgtcccccgtgtctgctgattacagctgaaggacaggtcctcctgggatgcagcatcagtgtcctcggccgcccctggtagcctccggggcaccatccgtgcagggagaggcgctcctgcctctctaccgtgcagggacagtcgggtgggcttttggtacacctgccaggtggtgctgaccaaactgagcttcatgcccccggtgcagtttcgctgatagcacccacaacagctcttcctttctccctcctccctccctcctcccaaataacccacaccaggttctgctgtcagagtctgcgataggagtcccatgttttcacttttttcacccagtacagcgagtccttcctttccactgcagtaccagtaaatctcgccaaagatggctactcggagatatatgggtctggaagtgtatccctcccatgtgaaggggtctgtagtgtcaggtggaaccggcccttgtctccacccacagggaccaccttggcctgcagcccagactgcaggagaacagaagagaagggggcctctccagaacatttggcgattaaaaaaaaactttttttttttttttttgagacggagtctcgctctgtctcctaggctagagcgcggtgatgcagtctcggctcactgcaccctctgcctcagcctcccgactagctgggaatacaggggcccgccaccatgcccggctaattgttgtatttttagtagagacaacgtttcaccatcttggccaggctggtcttggactcctgacctcgtgatccacccgccttgacctcccaaagtgctgggatcacaggcgtaagccacggcacctggccaaaattatttatttattttttttgagacgatgcttgctttgtcacccatgctggagtgcagtgttgtagtcatggcttactgcagccttgaactcctggacttaagtgatcctcctgccccagcctccaagtaactgggacataggtgtgcactaccacacttggctaattttttatgtttttgtggagacaggtctcactatgttgctcaggatattcttgggaactcctgggctcaagcagtcttcccacctcagcctctcaaagcactaggattacaggtgtgtcaccacagctggcagtgatttttttaaaggtaaatggctctgtttggtgggtgctgtcggcgccaaactagctggatgggctgtgccttgtaccacctttgcctcctgcacagggttaccttgggcttggggagcgcatgggccttgaccgaagccctgagtgggttaagggtagtcctggggggaggagaggaggatgcggaggccgtttcctaccccagtgtgcagccgtcatgggacaggcaggtgctggagcaggccgaggacccctatctggggtggcatcctttgggggaggggtggcagcctggagccagaaccacgttggccaggatggaacttttttttttttttttttgagacggagtctcgcttttgtcacccaggctagaatgcagtggcgcaaactcggctcactgcaagctccgcctccctggttcacgccattctcctgcctcagcctcccgaatagctgggactacaggcgcccgctatcacgcccggccaattttttgtgtgttttttttagtagagacggggttgcactgtgttagccaggatggtctcaatctcgtgaccttatgatttgcccgcctcggcctcccaaagtgctgggattataggcgtgagccaccgcgcccagccaggatggaacattttttattatagtaaagtgcacacaaaacgtgccgttataacagtttttcagtgtacagttcagtggcacgacgtgtatctacattgttgtgcagccttcaccaccacctgtgtaggagtggctttgaaaaggcagagtatggccaggcgcggtggcttacatctgcaatcccagcactttgggaggccaaggcaggtggatcacaaggttaagaaattgagaccatcctggccaacatggtgaaaccccgtctctactaaaaatataaaaatgagccaggcgtggcaggcacctgtaatcccagctactcaggaggctgaggcaggagattcgcttgaacccgggaggtggagattgcagcgagttgagattgcaccactgcactccagcctgggtgacagagcaagactccatctcaaaaaaaaaaaaaaaaaaaaaaggcagagtgcaaattcccctggacttgagtgggcatgagtctccccaacagtgtggagggcccacagctgctccccctgctcccttggatctgcacctctgggtaggttctgtaccaagtgggctgagcccttgagccagggccagctccctccaacctccacatctccagggaggatgcggtctggctcttccaccttcagtgatgctccagatgtaatcccaggagggtgtccacacctagttacaggagtctgagagcctggtgcttcctcagggcccctgagcctcctgggctccaagtgcttgctcctgtgcgcgaagttgcagcagccgcaggtcctgtgctctgggagcacacaggatgattgaggtgagactgactcgagctaccccaaggatagaaactagaacgtggatccaagagggggctcacgggtgggctaggggccagattttttcttttctttttttttttttttgtttgagacagtctcgctctgtcgcaaagctggagtgcagtggtgcaatctcagctcactccaacctccgactctggttcaagtgattctcctgtctcagcctcccgagtagctgggagtacaggcatgcaccaccacacccagttagtttttatatttttagtagaaacggggtttcaccatgttggccaggctggtcttaaactcctgacctcaggtgatctaccggcctctgcttcccaaagtgctgggattacaggcgtgagccaccatgccccgcccggagatctaatgtagtagagataataacctttatctgccacatgtagcaaatattttctctggctcttccccccgccccctcctcttttttttttttttgagacggagtctcgctctgtcgctcaggctggagtgcaatggtgtgatctcggctcaccgcaacctccgcctcccgggttcaagccatcctcctgcctcagcctcctgaagttgggattacaggcgcccgcaccacacccagctaatttttatttttatttttattttttctgagacggagtctcactctgtcgcccaggctggagtgcagtggcgcaatcttggctcactgcaggctccgcctccggggttcacgccattctcctgccgcagcctcccgagtagctgggaatgcaggcgcccgccaccacccccagctatttttttgtatttttagtagagacggggtttcacagtgttagccaggatggtctcgatctcctgacctcgtgatccgcccgcctcggcctcccggagtgctgggattacaggcgtgagccaccgcgcccggcctgtccacttttcctcagtgtcaccttgagaataccatttctgaggaaaagcatctctacatgtgcctagaagactggaacagctacgcatcaaatgttaggggtgtggatgaggcctgcctctaccccgtgtgtgtgtgtgtgtgtgtgtggcatgtctgtgttacacatgtgctcttggatatgacagccatgtcctgttcttgtttacacatgacacagtttgccgcgtgtcaagcggcagctgaaggatgtgctgcacccattcctggacctgggatacacaggaaggtgcagcaagccttgttttcggaagttctacaatgaccatgattggttttatgtggacaaatataaaaaagcttcactctccgtagtgatgtcgggtgacggcaggggtctgggtcggttcctggtccacctcgccagctacgtggctaggtgctggggctggtcccacctccttcaccacaaccccccggcaccccaggtccccgattccaggccacagccgcggcggctgggtgctgcgcaggtaccggctcgcgccgggagggggcgctgttccctaacctgctccgagtcagccccgggcccttaacgccgcccgcgtgcgttcacgctgcaggtgcggagttctcgcggtgggtccgggccgcgtgctcggcgcagagtggggagggcgaagccagccgccctcgggatgggcagagtcggccgtcctcgcagcccgccgcccggggcgtcccgcggccctcacctaccaccccattcgggagggtcaggctgcacgcagttcggtgcccccatggccgaggccccaaacctgctggaggtggaaagaggcgcgcctggatctgggcactgggggtgtgccccaggccctcgcctttccttggggaggggcggcgccttcctctcgcgtcctgacctcgagagagcacggcaagaaggctgctcctgggagaggctttactcaaacacggggaaggtcgcctggggatcccgcggccacccacccacagttcagcggtactcggaaaccagcgccgagataacgtggctcaggaacttgtccagcgacgcctgcagcgcggggctgaagtctccggggtagtgccgggcgagggttaccagcaggcagtggcccaggagctgcggcgagcgctcaaggctcactcgcctgcacccgccccgcacgccccccgcacccaccccgccggggccctcccggggacaggggcccagcacggcagccgctcacctggaagctggccgggtccactcgcagctggcacgcgtgcaggtggctcagcgcggacagcgcgtggggtaggtcgtccaggcgctccacggcgaggctcagcgcgtccgccaccttctggccgtgggctctgacttgtgaggagccggggctcaggtccaggtgggagaagtaggtcttcgtggcggggaaagccaggaaggtcctgcgagaggaacgtgggtgaggcgcgtccggggggcttggggagggagggcccctgggggcgggggcgcccagcctgccgcacctttccagggcctctgtcgtgtagacgccgacgttgctgcccagcttcttccacagggcgcgcaccagcgcccggtcctccgcggacagcgccatccccgcgctggaacccgccgcgccctgcgaccccgctgcgcctgcgcggaccggccaggggtcccgcggcctccagggggcgccgcgccgcagcttcgccgcccgggggtccagggcctcgtcggagatcccgggaccgcgcgcgctcaatctccgacagctccgaccggggccctctgaatcgccctggatccaaggccccccgtcttaggtgttcactatatggtatttagtctctactaaaaacacaaaaattggccgggtgcggtgagtgcagtggcgccattccggctcactgcaacctccgcctcccgggttcaaacgattctcctgcctcagcctcccgagtaactgggatcacaggtgcatgccaccatgccaattttgtatttttagtagagacagggtttcaccgtgttaggctgatctcaaactcccgacctcaggtgatcctcccgcctcagcctcccaaagttctgggattacaggcgtgaaccaccgcgcccggccatgtacattattatagcactgaatttcggcatggatttggcattggaagtcagtttattctgcctcttgattctattgtgacacttgcccgagtctgttttctcatttattatataaaatgagggtgacagtttcttctcagattgtgagaattaaacggataacaactgtgaggtgcctgactcgtagcaggtgtttcttcagggcagtgaacatttattgagtacctgggatgtaacccaagaataatagtaaatgcatatgcagcactcactctgctgtaccccttatatcttttttgttttaaaaaaggtgataaaatagacataaattaccattgtagccatttttcaggtataaaatttggtgatattaagaacacttagtgttatgcagccatcaccactatctaggtcagaactttttcatcatcccaaacgccacctcggtactcattaacagtaactctggccccggcagccactaatccgcttttggtccctatggatttggctgtagcggatattgcatatagatggggtcatgcagtttgtgacctttggtgtccggcttcttttacttgtcaaatattttcagggtgcagctacatcctatcagtgcttcatttctttttgtggccaaataatattccattgtgtgtatagaccaccacattttgtttacccattcatctactgatgtataatttttataattttttttgagatggagttttgctcttgttgcccaggctagagtgcaatggtgtgatctcgggtcactgcaacctctgcctcctgggttcaagtgattctcctacctcaacctcccgagtagctgggattacaggcgtgcgccaccacacccggctaattttttgtatttttagtagagatggggtttccccatattggccaggctggtctcgaattcctgaccttgtgatctgcccaccttggcttcccaaagtgctgggattacaggcgtgagccactgtgcccaaccaccgtgctaatttttaaattaaattaaattagattaaatttttttttgagacagagtttcgctcttgttgcccaagctggagtgcgatggcgcgatcttgactcactacaacctccgcctcccaaagtgccaggtttacaggcatgagtcatcacacctggacaatttttgtctttttagtagagacagggtttcactatgttggctaggctggtctcgaacccctgacttcaggtgatccacctgcctaagcctggcaaagtgctgcaattacaggtgtgagccaccgcgcccggccaatttttataattttttcttaggcttagtcaactgaagcagcaggagtggagaaggaaatgataaatttataactggttctgatcaattaattgtaaaaagcgctgcactccaaccagccctctgctgtacatttgacatatttctacctttaggtcagacctccattcttcctgatgaaataacgaagacaccgtcttcctgacagttgatactgtacccacaggctgcgggaaggacatcacaaacgcaggcagagggcctgccataggtgtttaccaagggtgattcatgggctcagggaataaaagatattcctatcagttgagggccagggctttatggctaccagctccgggaaccctccctctgataccccaggcactgcaagcctgctcagcagagagaaaacacacaccagggagaagggaccttctagccaggcctctgtggccccgctctcctctccagtcgcaatgggacaggctccccagcctcaggggagctgagtgggtgctgagctgggccctgagctgggcccagagacaaacgcctgatcttgacagccccagggcgtcagtgtctggtgtgtgagcattctggggtgacctgggggtgaaagtagagcccctattgaattgcctggggcctgcagttgcaccccgcacccctgatttcatctagactgtgcctgtatctgggaggttttacggagactagtgggaacgatgggggatcaatgcagccatgctggagtgggacttctctgacctacccaccacccatatgtgggaggacctctgggaaaccagtgacgtcccaggcagaaagccagccagttcttggcacaagagtgcccagaaacgtaaagatggataaattcattatttcagcaaacctgcattgaatctgaaaagtctgggaataaaactcgggaaagagcaaatgcatcctcaaagcactctagggtccagcgtttttccagctggacttcgcggtggctccactttccctcctccatcccctcctcccgcccctgccttttcctaccctatccagctgcagagaggttctagccatgtgtgtcccagctgctgtccacgcccatgcctggcacgtttgctgagggaaaaaactcaggcacacacaggctgccgcccactcagactttattcaaagaccacgggggtacgggtgcaggaaggggaggaggggctggggggaggcccaaggggcaagaagcatggccaccgaggctccagcttaacggtatttggaggtcagcacggtgctcacagaagccaggaacttgtccagggaggcgtgcaccgcaggggtgaactcggcggggaggtgggcggccagggtcaccagcaggcagtggcttaggagctgtgcagagaagagggtcagtggggccgagggcccaggcccgcagccgccgcctgcgctacacctcccgcaacccgcgtgatcctctgccctgcgaggaaggcgccatctcgcccctcgacccagatcgctcccggcccgccgctcaccttgaagttgaccgggtccacccgaagcttgtgcgcgtgcaggtcgctcagggcggacagcgcgttgggcatgtcgtccacgtgcgccacggcgttggtcagcgcgtcggccaccttcttgccgtggcccttaacctgggcagagccgtggctcaggtcgaagtgcgggaagtaggtcttggtggtggggaaggacaggaacatcctgcggggagaagcagagtgaggggtggggtttgggtccggggccaggacggttgagggtggcctgtgggtccgggcgggcgaggagcccgggtcggagcaggggagggagcctcacctctccagggcctccgcaccatactcgccagcgtgcgcgccgaccttaccccaggcggccttgacgttggtcttgtcggcaggagacagcaccatggtgggttctctctgagtctgtggggaccagaagagtgccgggccgcgagcgcgccagggtttatgcttggggcgcgggggcacgcccggccgggcggcgctcattggctggcgcggagcccggggcgcggcctggaccgcaggggagtcccgggcggggcctgcgcggggccgggcggcgggctcggcctcccctgggggtgcacgcggggcgggggccaggacgtctccaccctccacccgccactccactcccgcccatcccgctcgcccgggggcagggcggtagcggcgctggcggggccggcccgttggggtcgggcgctgtcggctcgtgcaccccggagcgcagcgccaccctttcctttcgggcgccggagcgtccctagcgagggagaaagtcagcccgcacccccgccccggcctggcacgcgctggacgcgcatcgactccagcgggatcggggaacacacgggcgagcgagtgcgagccgggaggcttcgcccaatcctggggcggagaggaatgcgcgcacccggacgccctggcccataggaactcaaaagaatttctgcgcagagcccctcctgctctccagcctcgcttcctgcagctccctttccctctggcgatagtcactagtgtgcttgagtgacaggcaccgggaaggaataaacaccaggacgcaaaaagcacggggctgggctgggggcggctccagattcagactcctctacccggggttgtggggtggcgcgtggggtggtgggtgctggctaagccccaagtcatggactcacagtttgtgtgactgactctcccactggcctagaggtcgtggttcactgtgacacccccagctctccaaatgctatctgatggaagacttgctaggtaaatactggttaaacaggtaaacaaagcaatagctggaaccggctggagcattcaacctcctctgggaggtaggcagtcctctaaccatcacacaagtacacacagaggtgcagacctcatcacaggccctgaggaagtctggaggtgtggacgaggcattcaaggtgaccagggttagtctgagggcttcctggaggaggtgagacttaaggatatgtattaggtggaggaggtggaggagggaggaggcttggctcggggaggggaaaggacagaggagacaagggccctgtggttggagaatggaggtggggagatgttggggtgatgaggctggccagctcctgcagggtgaggaaggaaggggtggacttctggggaagggtgggaggtgcaggagtgccagtgggtgcatccctgtgcatgaaaagtgatgttttttggggggatggtactgaggagaaaacagcctgagaaatcactgataagtcatttcctgggggtctggcagaagatcttgctttgaggagtgcatcaggtcagcacccttcagcctgctccctgccctgtctccccaggcccttactcaggccctgccctgggtgtccaggagcaagccagggtaagctgccttgggcagagaaggaagtagctccgaccagcttagcaatgcttcccccgttggatcttctcatttcccctccctgtctgccaccctcttctgactctgcccacagcctgaaggaaaaaaaaaagataagatgtgggggcttttttttttttgaggcggagtttcgctgttgttttccaggctggagtgcaatggtgtgatcttagctcactgcaacctctgcctccttggttaaaatgattctcctgcctcagcctccggagtaggtgggtttacaggcatgggccaccatgcccggctgattttgtatttttagtatagatggggtttctacatgttgatcagggtggtctcaaactcccgacctcaggtgatcctcccacctcggcctcccaaagtgctgggattacaggcgtgagccaccgtgcctgtcggattttagtttattttttaaagtgtttctgctgaaataacaatgctctgggctgtgaggcgcaggaagagcgggtggtggagaggggagggaactccccaacaattcagagaggtccatgtccagaaggaaagcagtgacagggtcctctccaccctccccaaagctcaatccagtactgtgagtgtggagggggaggcttgctgtggggcagggactgggttggaagtgctgctcatgttcctaggctggctgagagccagatgggctgtgcaacttcccagcatggattccaggacttcagcaccggggacagggacgtttccagaagttgctggcagcacaggaagcagaagaccaggaggtcccagaggccctgggtggggcaattagctgggagctcagggctgggcacacagtgagttctgaatgcaccttacaaactgcaggagacgtgcaggagtaaggccgcaaggtgctctgctgaagagtctccccaggtgtgggctgccggctgtgagcatcccagccccttcctccttccccactgactgggctgctctcagagggtcaccgtgacacaggaagtgtgagtagggccagcaccctcactccagccacctaccctctggcaggaaggggtgggaatgagagaaatgttctggcacctgcacttgcactggggacagcctattttgctagtttgttttgtttcgttttgttttgatggagagcgtatgttaactgggttcaaccagggagatttcaaaggagggtggcgatgctgggactccctgagtagaaccctggatgcctctctcctccccagcttctgagccactgcctgcaggcctggcacctctcaggacaggggatggttcagcaccttctcttgagcaggcccacctcagcttcccctcccatactccctgcagttctccctccccagccccatgcagctgcagagaggtccttggtctgagacaggtaaacacctccattgttggcacattccgggatagagagaacccaggcacacacaggctgctgcccactcagactttattcaaagaccaggaagggccggtgcaaggaggggaggagggcccgttgggaggcccagcgggcaggaggaacggctaccgaggctccagcttaacggtatttggaggtcagcacggtgctcacagaagccaggaacttgtccagggaggcgtgcaccgcaggggtgaactcggcggggaggtgggcggccagggtcaccagcaggcagtggcttaggagctgtgcagagaagagggtcagtgcggcccaggcccgcagccgccgcctgcgctacacctcccgcaacccgcgtgatcctctgccctgagaggaaggcgccatctcgcccctcgacccagatcgctcccggcccgccgctcaccttgaagttgaccgggtccacccgaagcttgtgcgcgtgcaggtcgctcagggcggacagcgcgttgggcatgtcgtccacgtgcgccacggcgttggtcagcgcgtcggccaccttcttgccgtggcccttaacctgggcagagccgtggctcaggtcgaagtgcgggaagtaggtcttggtggtggggaaggacaggaacatcctgcggggagaagcagagtgaggggtggggtttgggtccggggccaggacggttgagggtggcctgtgggtccgggcgggcgaggagcccgggtcggagcaggggagggagcctcacctctccagggcctccgcaccatactcgccagcgtgcgcgccgaccttaccccaggcggccttgacgttggtcttgtcggcaggagacagcaccatggtgggttctctctgagtctgtggggaccagaagagtgccggcccgcgagcgcgccagggtttatgcttggggcgcgggggcacgcccggccgggcggcgctcattggctggcgcggagcccggggcgcggcctggaccgcaggggagtcccgggcggggcctgcgcggggccgggcggcgggctcggcctcccctgggggtgcacgcggggcgggggccaggacgtctccaccctccacccgccactccactcccgcccatcccgctcgcccgggggcagggcggtagcggcgctggcggggccggcccgttggggtcgggcgctgtcggctcgtgcaccccggagcgcagcgccaccctttcctttcgggcgccggagcgtccctagcgagggagaaagtcagcccgcacccccgccccggcctggcacgcgctggacgcgcatcgactccagcgggatcggggaacacacgggcgagcgagtgcgagccggagggcttcgcccaatcctggggcggagaggaatgcgcgcacccggacgccctggcccataggaactcaaaagaatttctgcgcagagcccctcctgctctccagcctcgcttcctgcagctccctttccctctggcgatagtcactagtgtgcttgagtgacaggcaccgggaaggaacaaacaccaggacgcaaaaagcacggggctgggctgggggcggctccagattcagactcctctacccggggttgtggggtggcgcgtggggtggtgggtgctggctaagccccaagtcatggactcacagtttgtgtgactgactctcccactggcctagaggtcgtggttcactgtgacacccccagctctccaaatgctatctgatggaagacttgctaggtaaatactggttgtaaacagataaacaaacttggctctgggtagggaaaggacaggggagagaaggcccctgtggttgcagaatgtaggtgaggggatgtggggtgaggaaggaaggggtggacttggcgagggggagggtgggaggtgcaggagtgccagtgggtgcatccctgctcatgaaaagtgatggtttggccaggctcggtggctcacgcctgtaatcccagcactttgggaggccaaggcgggtggatcagctgaggtcgggagttcgagaccaggctgaccaacatggagaaaccccgtctctactaaaaatacaaaaattagctgggtgtggtggtgcacgcctgtaatcccagctactcgggaggtggaggctggagaatcctttgaaccagggagttggaggttgcagtgagccgagatcgtgccacagcactctagcctgacgacacagcgagactctgtctcaaaaaaataaatacataaggccgggcgcggtggctcacgcctgtaatcccagcacattgggaggctgaggcgggcagatgcgaggtcaggagatcgagaccatcctcgctaatgcagtgaaactctgtctctattaaaaatagaaaaaattagccaggcgtagtggggggcgcctgtagtcccagctactcagctactcgggaggctgagggaggagaatggcgtgaacctgcgaggtggagcttgcagtgagccgagattgtgccactgcactccagcctgggtgacagagcgagactccgtcacaaaaaaaaaaaaaaaaataataataataaaaataaaaaaataaagtcatgattttttggggggatcatgatggaaacatagtaataatcagtgagactgtggaatggcgcagagctgaatgaactggctgaaagggatgcaggggagacacttcactgagaataggaagttgtacacaggtatctacagtatgatggtatttttgtccaaaaagagagcctgtggcagtagttgtagatgtagctgtgttccctcagcatgggatggggcccatgggctgagttccaaacccttcattttggtctcttctgggggtgggtgtgaggagacaggaaagagagacactctcctactttaagtaacacaaaaaagggtgtgtgtgtgtgtgtgtgtgtgtgtgtgtgaaagcatggatagattttagtttatttatttatttatttatttattttttgagacggagttttgctcttgttgcccaggctggagtgcaatggcgtgatctcagctcacctcaacctccacctcccgggttcaagcgattctcctgcctcagccttcctagtagctaggattacaggcatgcgccaccacacccagctaattttgtatttttagtataactggggtttctccatattggtcaggctggtctcaaactcccgacctcaggtgatcctctcgcctcagcctcccaaagtactgggattacaggtgtgagccaccgtgcctgtcggattttagtttattttttaaagtgtttctgttgaaataacaatgctctgggctgtgaggcacaggaagagtgggtggtggagagggggagggaactccccaacaattcagagaggtccatgtccagaagaaaagcggtgacagggtcctctccaccctacccaaagctcaattcagtactgtgagtgtggagggggaggcttgctgtggggcaggggctgggctggaagtgctgctcgtgttcctaggctggctgagagccagatgggctgtgcaacttcccagcatggattccaggacttcagcaccggggacagggacgtttccagaagttgctggcagcacaggaagcagaagcaccaggaggtcccagaggccctgggtggggcaattagctgggagctcagggctgggcacacagtgagttctgaatgcaccttacaaactgcaggagacgtgcaggagtaaggccgcaaggtgctctgctgaagagtctccccaggtgtgggctgccggctgtgagcatcccagccccttcctccttccccactgactgggctgctctcagagggtcaccatgacacaggaagtgtgagtagggccagcaccctcactccagccacctaccctctggcaggaaggggtgagaatgagagaaatgttctggcacctgcacttgcattggggacagcctattttgctagtttgttttgtttcgttttgttttgatggagagcgtatgttaactgggttcaaccagggagatttcaaaggagggtggcgatgctgggactccctgagtagaaccctggatgcctctctcctccccagcttctgagccactgcctgcaggcctggcacctctcaggacaggggatggttcagcaccttctcttgagcaggcccacctcagcttcccctcccatactccctgcagttctccctccccagccccatgcagctgcagagaggtccttggtctgagacaggtaaacacctccactgttggcacattccgggacagagagaacccaggcacacacaggctgctgcctactcggacttcattcaaagatcaggaagtgctggggcagggaggggaggagggcctggtgggaggcccagcaggcagggggcatgaccaccaatgctctagcttaatggtgtttttaggtcaacacagcactcacaaaagcaaataatttgtccatggaggcaccacatgggtaaactgggaagggtgtggcaggcctaggtcaccagcaggcatttacccaggaactgtggagagagagtcaggggatgcagatactactgccacctgtgctccacctccctgaacgcgtgggagggtctgtcctatgaggaaggccagctgcccccacaccctagattcctcccagcccaaagctctccctgatgttgcctgggtccacccacagctcgtggacatgcagcttcctcagctcagacacatcattgggcatgtcatctaagtggaccacggcattggtcagcgtgtcggccacctacttgcattgtttcttgatctgggctgagccataactcagggccaagtgagaggaaggtcaggaacatgcttcagggggaagcaaagagtgaggggctgggggctgggtccagggtaagaatagttaggggtggccagtggagccctggagtgggcgttggacccaaggtgtgagcagggagaggagggttcttgcctctccagggcctccgtggcatagccagcagtgtggttgccaactttctcccagaccgccttggtgttagccttgtcctcaggagacagcaccacggcagcttatttctgagtctgtgtaagctcaaaagtgaaaggtgggggagagtaggagctcttatgcctgggatgcagggtcattggctggcaagttgccaggaggtgcctggcacaggaaaggggaggaggagtgagtgagagtagacaggttgcccaaggctgccctgcgtctcttagtcctgcccaaacagagaccagctctccacatggtagccttcccgctggcattgtcctgagcttccacacagggtcctgagcagcttatacccataaggtatccacatatggcccagacccaggcagcttcctggatggggagaagagcacagtttttccaaagtgaaacataagctgctttcacaccaaactctgcctgggacaaaaagctgttaattatccatgtaaacagttgcgggggctgggtgtggtggctcacgcctgtcatcccagcactttgggagaccgaggagggcagatcacttgaggtcaggagtttgagaccagcctgatcaacatggtgaaactgtgtctctattaaaaatacaaaaattagccaggaatggcggcccatgcctgtaatcccagctacacgggagacagaggcaggagaatcgcttgaacccaggaggttgaggctgcagtgagccaaaactgtgccactgcactccagccggggtgtcagagcaagggcctatctcaaaaacaaaaacaaagcaaaaaaaaaaaaaacccccaaaaacaaaaaaacagttgggggatgtagataacgtggggccaagttctccaaactaccgggctggggtcccaggcagtgcagggcaacaggtcactggcactgactgctggggggagtttggccgactcacagtcagggctccacttccagcagctctcttcagacctcgttgctgactgccaggtcagacctgggtgccaggcctggtccagtgctccccacacagacccaggatggccaacccagagccaaccctattcagggtttggagacctccaaggtcccactctttcctcagcccctattctttgtctgaaaagcctggggtggagccctaagattcccttcccagtcctggggagggagaagagggaacctggggaagggagtgccttggcctgggcacctgcagagattgagacacggcagctggggctgggtggaggggtggggtggcaacgaccctgcaggcacccaccctgtgttatgatttcaaaaattatttcaaaaatctcgtgagttggacgttgtttttctattcgataggtaaaggcctgagagctctgggacacgcccagggtcgcacagcttgtcattgagcaggctggaagactaaacctgctctgtctgccaaattgtggccactgaggacttcctcccgacctcatccccagggctgcagggtcacagggagggctaaccaggctagcgcaggtttgccactgaggaagtgtccatgggggaaggaaggggaaaggaacaggtctgcggagccctctgctctgggccaacgaattaggttgcacatttggctctgggacctcagtttctgcatctctctgcaaaaagggccaggattagcatctacaggtcccagcaggaagtggggatggagggagaatgaatgaataaatgcgtgaatggggaagtgctttgcgaacagtatggttggaagcccgattcaagggttgaagtcgaaggccaccctccctacccccgccacatcacagtgctccctctgccccatcgcactcctcgccatgggaggacaaacctccgggggtggggcgcatttgagagttctaggaggctccttttaggtccctgagcttcactggccaacaatagtgacctcgctttgctagctccccaaagaccacacaggcaggggcagatggttcgggcctctgtttattgacaggcacagaccaaggcctgcgcagcacagggctcagcggtatttttcggtcagcaccacggccacaccagtcaggaacttgtcccacgccgcttgcatttgcacggtgaactcgtcctgcaggtgggaggccagcacgacgtggaaacactggattagcagctgcaggagaaggggccggtgagacggggtctgccccgctagggacccccagagcccccccaccccggctgcgcgctgcaccattgccccggccggaaaggcctcaccggaaagttggctgggtccacgcgcagcacgagcgcgtgcaggtccgccagcgggctcagcgcggcgcgcaggttgtccacgtgctgcaccgccgcgcccacagccgccagcatgcgctgcccgtggctcagcagctgcgtcgcgtcctggcaggcgctcaggtgcgggaagtagaccttggtgctggggtacaccgtgaagagcctgcaggaccaggtcagtgaccggggaggagggcggctgcgtggggcttcactagcgcccacaccgcccagagcccggggatccgcacccgaaggaccttggatggcgttggcggcccacgcgcccaaaaccctcatctccacctccctgagctcccggagaccccgcctctaccgacctgagcagcagctccgccccgaattgcgcctcgtggcccgcaatcaggtcccagacctgcgcgatttgggcgcgctcctgggcgctgagcatggcgccgcctgacgtgctctgggggccgcgcccgccgccctggcctccttatagagcctccgggcaccccgcccgtccttatcggcccgagcgcggcgggaacgcggggaccctcggcctgcgccggggaacgtaaccagcccgggttcccgtctgtgtggaggcctcgacctccgggatcccagggtttctggcattgacccacgccgttgcgcgtgggcacctttactgcagactttaggggcatctgtttactcccctcgggtaaagttactgctctgccaggagggagcacatgggaggaaccggagagagaacaccgggcaggaaaccccctactctcttaggagtcggggagggaccggcctcagggacccccgtagctgccagagtcccgggattcggacgtcaggctttgtggaaaagttccctgagccccgacacgcttccaatacgcttagtgaagtgacaatctttgtgcgatatgggaagccgggagacgcacaaacgcccgtccgactcaaggaccccaggagacgccgcgggccggcccgggactgctccgctccacccgggccgcagctccggtgctcaggggctagaacctccccaaggcgccccccaagtgaaccccaggccgcgacgacagtggggacgaccgagttcctgcgaagcccccggacccatcactcagcttctcccctccttccctccaatactgagaacacagagcccagatcgctccgtcctcatccatttattggagtcagggcaggaactgtgggagggtgaagggcaggggaggggccgcagcctgtcctgggggtcccggaggcggcgctcagcggtacttctcggtcaggacagaggatacgaccgataggaacttggcccaggcggcgtgggcctcggccgtgaagtcggcggggaagcgcgcggccagggtgaccagcaggcagtgggacaggagctgggggcgggggcggctcagtgcgggggcggggcctagcccgggccccgccccgcgaccccaccccgccccgccccgccccgcgccccgccccgcgaccccgccccgcgaccccgccccggcccggcccgccccgccccgcgccccgccccgcccagcccctccccgccccgccccgccccgccgggccccggccgccccgcccgccccgccccgccccgccccgccccgcgaccccgccccgccccgcgaccccaccccgccccgccccgcgaccccgccccgcggccccgcccgccccgcggccccgccccgccccgcccgcaccgcgccccgcgcaccttgaagttgaccgggtccacgcgcaggatgtaggcgtgcagctcgctcagcttggacagggcgccgccgatgtcgtcgatgctcttcaccgcgtcgcccacggcggccaccaccttggagccgtgcgcgcgcaactgcgcggaccccgggtgcaggtcgaagtgcgggaagtaggtcttggtctgcgggtggctgaggaagagcctgggacggggggcgggggccgtgagctcccagcagcgcggcctcccgccacggcccacgcgccctgcggccctctccgagcaccgggacacatctgcgaccccgcagcaggccccagcccctcctcgcggggcccgggtgcccaggcagctgcccctcccaggctgccctgggctagaggccccccaggcctctgcagctcccggctgatcgccctgcttccgacgggttctgtgcagcctggtccccaaatctcccgccctccgcctccagcacgcctggtgcccccagcccctccaccgtctcctctggccacaggacctccctcccagccccagactgggttgcccgccaccccttctgcaggctcatgacctcccagcagcgttccagggaaggaaaagctccctggcccctcccaggggatcagatgctgggaatttgaagctgggacagtgccctgatcccagatgctgggactttagaggctgtagtgccctggctgccctgtaaggcccttcaggcctagaacgaaacctttcaccctctgcttgtcagaacctgggcctgtgcctgcccaggtctcagcgagcccagatggttgtgcaactcctaatcgttccctccttaccctgccctcctcactgagagggaaggctatctgtctccactgtcccctccccacagtcccctcctcactgtcccttcctcactctcccctccccactgtgccctccccatggtcccctcctcactgtcctctccccacagtcccctcctcactgtcccctctccattgtcccctcctcactgtcccctccccatggtcccctcctcactgtcccctccccaaggtcccctcctcactgtctccttcccacggtcccctcctcactgtcccctccccacggtcccctcctcactgtcccctccccacggtcccctcctcactgtcccctccctacggtcccctcctcactgtctcctccccacggtcccctcctcactgtcccctccccacggtcccctcctcactgtcccctccccactgtcccctccctatggtcccctcctcactgtccccactccacggtccccttcccatggtcccctcctcactgtcccctctccactgtcctctccccactgtctcctactcactgtcccctccccacggtcccctccccactgcccgctccccactgtccccactcacatacctggcctcccacccagtccctctggcagtcccatctgacactcacctctccagagtctcggtgccgatggtgtcggcctgcgtggagatcttggcccacatggacacaatgatggtcccctaagtcttggtcagagacatggcggcagggtgggcggctgcactggagttgggcctgctcaggactggccttggtagtgctcagcccccagggtccccttatatacagggagctgggcccagccaggctgtggccattggtcaggtgaggggagggggctgcaggggtggtgtttcttatcagatccagtgacaaaggggccctcaggtgggactgggggctgaggaacctatcgcttctgtctccccttctgcccacccctgagtcacagctggagccccagcttcagggagattggggccccaatctgggcatgagagtccacgtggtcagcccagcccggactggcctcaggagtgactgtccttgacctccctgtccctgtgatgacagggtgacctagagcacatgggccctggcagagggacgatccattcctcacttcactgaaacttctctggcccaccttatgagctccagtttgcaaatgaggaaaccgagaccccctagagagaaagtgggacccagtgtcacagggtgggaagggacagacctctcccacctccggtgtgcagccccctcacctgaatgaggctcggtctggggttctcctccagtagccttgtaggggacactctgagccgggcacctaggcaggaaagcgtcttgggaggccggactcctcacagaaggtgaggtcatgcaggcctgcaattctgctcactatgttctcatcgcagcctggaggagaccctcctccagctctactgatttatttctttttatcctctctgtttattaactcccccctcctccgttagacaaccatttctatgtgctgaatatattccttttagttagtacgtgtgcttgcaaagggtatgattttatgcatgtattttaaatttatacgaattataggtagatataaaaattttgtttgttagtttgtttctgagatggagtcttgctctgtctcccagactggagtgtggtggcatgattttgacccactgcaacctctgcctcctgggttcaagtgattctcctgcttcagtctcctgagtagctgggattacaggcacacaccaccacggcctggctaatttttgtatttttagtacagatggaatttcaccatgttggccaggctggtgtcgaactcttgacctcaggtgatctgcctgcctcggcctctgaaagagctgggattatgagcgtgaaccaccgtgcccggcccatgcacatcttttttaaatagaggattttttaaaacaagggaaaaaaaggctgggcgtggtggcttgctcatggggccgcacatggtggctcgtggttgtgatgaggtcgcatcactgcactccagcctgggtgacagagcgaggttctgcctcagaaaaaataaaaataaaaataataataatagaaagagagaaaatgcatcttcacacactgatgcttttccgttgctgcgtcagcaagcgtgcccccatccccgctgacaggtgcaacatcttcagcctgcagagctcccctttgtgaacaagctctagtttttttctattataaacaactccatgaagaatatcagtgctttggatcttttcctggtgatagacctctagaaggggaattactagaaggagactcaagagtattcgttttttagctttttgaaacaaattacttttcaagacaattatatggacttacagttgcaaaattagctgtttgaggctcagtgtgggtgcccttcctgccctcgggctgtcaccgctggcctggagtaagttggaagtttagcactacacaccatggggcagctttcagaccgcaggctgcagaggtgagggaatcccacaggagactgacaccctttgttttgaaaactccctggagggggtctccagccagagtcagggtagggggggcaggtgaggcaggtgaggagggtattgaaaggacgcacaggaccttggggcctgcagtgtaccaggccttggggttgggtgcatgaggcagagggatgcgtgcgataggatgttagcaacggtaaatcagcctggcttggaaccgggtcaggcgactcccctgagccccctcttcccaagcaggggcgcctttggtcctcagaggctggggcatggggttgcaggggcctggacgagaggggccgggagatcctgagggcagcagataagggctgtaccaccagccccaaggcaggcccacagcaccaagtcttttctccctgtagctgcaagccgtgccgggctccctcacagcctgtgcccc

SEQ ID NO: 43 - DNA, 24815 bp, Mus musculus
ctgcatgcctggttctctgcgtctgcaaaggtgtcatgtttagtgtggggatgcctctagctcatttagccatggggcagtaaagacaaggttcagagcaaaaagcataattggatgcctacacacacacatatgtcttctgagtctgggcagcagtccctcccaagccctccactgacagccatgtgtcttctccttgagccaaagaagccaaagatcgtctttggagggtccttatcacaggtcctctgagggaatgagctccttaataccgctggtacttcagtgtgggatctattagaaaaacagtgaaaaatagacatcatatgagcatatgggtaggcaacaggtagctcatataaaaatgcctgctcttgccctcttccttccttccttccttccttccttcctttctttctttctttctttctttctttctttctttctttctttctttctttctttctttctttctttcagatagaatttcatgtagcacagtctggcctcaaaaacgttatatagataaggatggatgccctgaaactcttttttttttttttttttttttccgagacagggtttctctgtgtagccctgggtatcctggaactcactctgtcgcccaggctggcctcgaactcagaaatctgcctgcctctgcctcccaagtgctaggattaaaggcatgcaccaccactgcccggctgccctgaaactcttgatcctcttgtttctacccctgagttctgatatttcagatatgtgccttcatgcccagtttatgcagtgcttgggaattgatctcagagttgtatatgtatatgcatacatacatacatattaaaaactctactgaccgagggacatctatacacccacaaataatatttttgaactattgacagcaaagagtaaatttctcatacaatggatataaaccttaaaaaaatgtcaagtggaagaaaccaacaggacaaaggtcacacagtgcatggcttcatgtttgtaaaatatcaaaactgggggaatctatagggacagtaagtagcctcctggttgacagagccttttggtgggtgttggatggttacgggcaagtgggctagaggtactattttagttagtaaaagttctggaaatggttatagtgaagactgcacaacattgtggaagaatatgacatcactgacgtatacccatcaaacatgtctaaaatgcacaggactttgagccacatgcctctagttccagaacattggaacttgaccatagtcacacaaaaacccaaataagaacagaatctttcatgtaatgatgatgtattcaccgagggtgtcatcattgctgtcattattgagatatataataggcactctaaaggtcattgtccccaaaggaatttgccctatgatccaggcatataatatttttcatctacttaattctcacagctctgataagaatatatttttgaaacagacttagattttatttatttgaagaattatttattcattttaactatgtaagtacactgtagcagttttcagacaaaccagaagagggcatcagatagttttgagccacatgtaattcctggtaattgaacccaggacctctggatgagcagtcccatcttcttaaccactgagccatctctccagcccccacagttggaatgtattaaaggggatttttatctgaagtggtttaggcagagtcagggtctcattatgtagcactgctggcctggagttccatatgtaggccaggatagtcctgaactcacagacatccttttacatctgcctccaagtgctaagattaacctgtacctgtgccacaagacccagattgaaaggggtgtttaatgtagatttaaatctctttcattttatttcacacgtgtgggtgtttgggctgcatggatatctgtgcatctcttgtatgactgtggaagacagaagagggcttggatctacctgacctgaatttacaggcaaatgtgagcaggcatgtttgtgctgtgaaccaaagccaggtactctgggagagcagttagtgctcttaactgctgagccatctgtccatcccctttaaatgcagatttaactatgttgatatttaacgaaaggagacgtgttccaggagaaaaaaaaaaaaaaagaccaagtatgggtacgggctcctgacactcagtccttttcaataatgaataagaaaggaaaacctgtgaagtttccgaacgactcgggaggcaggacgagccgacagtgccaaatgaacactaaaatccattgtaatcgatagtacatattatatgccaatgtgcatgcagtaaacactttaaaatgtaaggcgtggagggggagcccagggaaacagagggctcaaagctgaaccagaatctgtgaacacctaggcatcctggaacgatgcagcgccccctggcggcctcttgtgtttcaggacgtctttgagctcagccagcgggcagagcgcaaggctcagttcactgaagatggctcggtcccaggatgatcagtggctggtccttgcgctctggaagaagatgggcagcaatgtcggaatctacgcgaccgaggctttggagaggtacgccctcgggctcatcttccaacggactgcggggcgaagaccggctctctgtacctccgggtccggctgagcccaaccctgttttcctacaggaccttcgtggctttcccctccaccaaaacctacttcccacacttggacctgaggccaggctctagccaggttaaagcccatgcccaaaaggtggccgatgcactgactctcgctacccagcacctggacgacctgcctgcttctctgtctgctctcagtgatctacatgcgcacaagctctgtgtggaccctgctaacttccaggtgagtcctgtattgagctcaccccgggttgctggagatgtgggtcccttcaaggcttggtgtaggggagaaattaaggcaaggcgtggcggttctctttcttcagttcttcagccactgtctgctggtgactctcgccaggcactatcctggagacttcagcccagagatgcatgcctccttggacaagtttctgggtcacgtgacttcggcactggtctccaaatatcgctgaattggggatacagggttctatagtctccacccatgcccttcctaaagctcacaatgtttgagtaaacctccccagggctgcattgttgtcctggacgcagaggggcacgagagaaatatactccccgcgtccagtactcctaaacaaggttccaagagactgaaagtacagataagctggtgtctcagatctcatatgggaggcagccatcccttgtttgtattgttttattgtgtttttgcctttgagataaatttcatgttctcatgtaacccaggctggtctctcaaatccatactaaaaaataggttggttttgaactcctgatccttctgtttccacccctttctccaaaccatcccccaatccccacccaccttggtttacctaccatacctggctccagagtggctctttctctttctttctttctttctttctttctttctttctttctttctttctttctttctttctttctttctttctttcttccttccttccttcctttctttctttctttctttctttctttctttcggtttatttattttatgtatatgagtacacagtcgctgtcttcagacacaccagaaaaaagcataagatctcattacagatggctgtgagccaccatgtgcttgctgggaattgaactcaggacctccaaaagagtagtcaatgctcttaaccactgagccatctcttcaacctgggttctttttatttttatttgaccttttgtttgtttgtgttctgtgtttgagatgggaaggggggggggtctcctgtgtcaaagtgctccaagctgcacaaattgtagctaactaggaaagagacatgcccacagtgaatgaactggctctcgctgcctagcgagaacagagtagaaaggaaggctttatagaccacacttccaaagggtcatgggttgggtggtaccaggagtcccactgcagctggaggatcagtcctagcaccttcacatattctcaagcaacagaggaagctcaggggtctccgctgttgggtcctatgacatcgaggtacaaatccatgcctttagccttggccacatcagttacagaactgtggctttgtctctcagaaaggtgatggaaactgagggcacaagtcagcataagtgacaatgttcaaaacaatggtgtgtgccccccagtcatcaccctctcctgggcttccactctggtcattctctagactctgctcagatccagatgggttaggcctggtcctatttgcaaggcagtcacctgcctggatccacatgggattcacagtattgataatgctgaatgagggtgtcagtggatgtccaggacacactgggcactgtcctagagacatttaatcattgaactgctgcctgcccaaccctgccatgcccagggtatgtgtattagggacttcagtgtcaggaggtctggagttaaagcactgtatgccagactcaatatcttagaataaggtttgtctagcaccaaagcctgtcgtgtagaaaggtggcactgggccctccaatcctaccttcagtggacttcagagaaggcaggtagtttcttctggctgcttaaggtctatcatattcatggcaaaaaaaaaaaaaaaaaaaaaaaaactgatttttttaacctgcacattggctacctctcaggctaaggaacatgccctgaacatccattagtcaggccttcagttctttctggacatgaggcaaactgtccggtatgagaaagtagaaggagctgtgagatcatctcctactatggcacatgcatgacaaacttctatgacatgggaaaaacactgacagagtggactcccccccacccgccatcattgagcaggcttacatccaattaggcagctgttggttactgccaagaatgagtacccctaccctcccgcccccaggcatatctcgccatgctggtcattgctctggttcatagcagggagagctttgtagaaccattggttgcacgcctccctcggcactttgcatagcacctttctgtacaatgaaggccagtcgtcagtgaggaagccttcaggtcagatccagcatgagtcttttgagtcccatgtccaaagcgcaaggtgtctccatcactaaggacttcccttaactctctgggagacagaaaaacggaaaagcaagagcgcatgttgtttttggagtctctcagattcccttgaccagcagctcacaggggacttctcctgcctgctactgggtatgttttagacagttgtcctggttagggttctattgctgtgataaaacctcatgaccagaagtgacttggggtgggggaagcatttatttaatcttacagctgtaaattagaaaagacacgagaattcagggcaaaacacaaggcaggaaggagcctgaccggggaaatgagatagaggtcttggggaagtactgctccatgtcttgtttttatggcttattcaccaaatttactaaataggattaactgatgttcctaacacacagtggggactagtaagcactacattcacccaaagtcaccaagagtccgaactcatctacagatacagttctatgtcgacagcacaaacttcgatgtagatactcacatagagtcaaacgtgcagaagagggggtcggagaaaagactcagcaggaagagcatgtaatgcttttgcagagggcctgggttcagttcccagaactgaacatcagatgctaataaccacctatgatggcagcttcaagtagattgattggggactggaaagatggctcagtggtcaagagcactgtctgctcttccagacacccagagttcaatttccagcaaccacaggtggctcacaacaatctgtaatggtgaccaatgtactcttctagtgtgtgtctgatgacagctgccgtttacccaaatgaataataaataaataaatctttttaaaaaggagattgattgattccatgttgtcttcagtactccacaggcaccagcattcacacatgcacagatggacactaaaactgatgggtagttcttacagttatctctactgatctggaacaagccatgtagataaggctggcttgaaattctttctatatataattatttatttatttatttatttatttattttggtttttcgaggcagggtttctctgtgtagacctggctgtcctggaactcactttgtagaccaggctggcctcgaactcagaaatccacctgcctctgcctcccaagtgctgggattaaaggcttgctccaccaccgccgggcttaattttatattttttacctgtatggatgttttgcatgttgtgtccttgcagtctagaagctggtgctacagacatagacccatttctgtacataagtttagaagcttggtaactttggattaatacgttagattcccctggagctcaagatgagatggttatgagttgtcatgggggttctggaaatcaaacccaagtcctgtgggaaagcagccagcggtcctaggctctgaaccatctctgcagccctggctgtcacacattgtaaaacaaaacagggcaatgtgtggtagaatacgtctttaatccagcatcttgaagacagaggctggtggatctctgtgagttcaagaccacagtattccacacagtgagtactaaacccaacaagggctcttgttgaggccttgcctcaaaattaaaattaaagaaataaataaacaaggaaggctggagtgttgcagggaaatctgatgcctctggcttctactcttccactgacaacttcacaaaggcattgtgtgtgtgtgtgtgtgtgtgtgtgtgtgtgtagtcctggctgtcctggaactcactctgtagaccaggctggccttgaactcagaaattcgcctgcttcagtctcccaagtgctgagattaaaggcgcgcgccaccactgccgggcagataaaatcatctttaattgttttatgtgtatggatgttttgcctgcttgtggctgcacaccaagtttgtgcctggtgaccatagaggtcagaagagtgtgtcaggtctccaggaactggagttatacatagttatgagccaccactgtaggttctgcaaactgaatccaggtcctccacaagagcagcaagtgctctaaacagccatccatacacaaaaaccaatacatacacatacacatatacccatacccagacccagacacacatacacacacagacacacacacagacatacacacagacacacacacatatacataaacacatatagggggaggggggggagatttctctgtatgacttcctgactgtcctggaactcaattttacactagcctagcccggaactcaccaagatccacttacctctgcgttctaatcttctgtattcagattaaaaccttcagccactacaaccagctatatattctttagttaaataaatctctaaaaaaataatgaggtaaacttcaggaacaaatagcatatgacaaaaatcttatcaaagtaaatggaaagggatgggtgtgctttcacgtttttaatcagagcatcccaaggcaggagtagagagatcgctgtcagttcaggacctgcctggtctacagagcaagttccaagccagggagactctgtctttaaaaacaaacataaacagtgagtgtatatttgtgtactgcatcctcgactagcccagcaatgttgcctgtgcaggcgcgggctggggaaagatgggggtagtagcttcggtctgaatgcaagtgctgttaagcagcaggctgctgtaagatgcagctggtcagaaaggagtctgagctctggtctcgggcacagaagcttccctcctgagatttccctctgcttccctggctcttagcagcatccagaaatatccttgtcctggcttgaaggccactggctccaggctggcatcccagtctgcctggctagtgtattctagaacatgatctaactttccaggcttttctcagaaggagccagtgtaagttgcagtggatacagcttcccgggaggtggcaaacaccacattcactgtaccacgttccctagtttctgggcaaggactgctctgaacccctaggtagttccttcctctccctgtagacttctttccttacagccgaatcatgttcattatatttttgattatgtgcataaatgtttctatgtaggccgtgtgtgtgtgtgtgtgtgtgtgtgtgtgtgtgtgtgtaccacgaaggtcacaagtggggtgtcaaatctccagaagctggagctactgtcacaggtagctctgatccacctcatttgagtctggggaaccaaacacaggccctcagaaagggcagcaagcatccttcagtgctgagtcatctctgcagccacctcctttttttttttttttttttgagacagggtttctctgtgtagccctggctgtcctggaactcactctgtagaccaggctggcctcaaactcagaaatctgcctgtctctgcctcccaagtgctgggattaaaggcgtgtgccaccactgcccggccctagccacctcctttttatttgtgtgtagaaaaacacataagaaaaaagctaaattgagcagtggtggtgcatgcctttaatcccagcactcgagaggcagagacaggcagatttctgaattagaggccagcctggtctacagagtgagttccaggacagccagagctatgtagagaaaccctgtctggaaaaaaaaaagagagagagaaagaaagaaagaaagaaagaaagagagagagagagagagagagagagagagagagagagagagagagagaaagaaagaaagaaagaaagaaaggaaggaaggaaggaaaaaggaaggaaggaaggaaggaaggaaggaaggaaggaaggaaggaaggaaggaaggaaggaagaagctgaagtccacccaggctttcacacccttttgtgttatcagtaggaagagtcactctgtcatatcgctctacccagaaaaggcagaagtaaacgttgggaatgagcccagtgtcttcactcagtgtaaacaaagatgactctgaagggaaggagggttgaaggaagggaggaagagagaaagggaggatggtgtgtggaggacaggagaggagggcggtaaggagtgcaggagggatagggagaagaaaggagagaagagtgaggagggaaaaggaaggtgagaaggagaggaatttgactgctttatgactaagacaccatgtaagaatctcaaggaggagagactcaaacagtatccagaaagaggggagcccttccctgaaactccacccccaaggagcagcccaccacctctaccacagccaggggcagccattccttctacctctaagtcccccaacatcttatccttcttgtcctcagagccagtacgaagcctgagttgggggttgcatagacgttaggcacagactaggcgaaatgatgcgggacagttcggccaaaggctgagcttctgtgccccagacaaaggcccaagttttctttccagacacctgtctctaggggagcaggagcaggaaaggggacgaaccatctgaacctaaggctggggtcagtgaacaaggtgatgccagctcaccatggacactaccctgcggtgtaagctggaagtagccaaggatgtggccaagctgagagttgatgccctcacacatgcccaccctacctagatataaattgcccagttctgtgtgcatccagcaatctggtactgaagcacactctagtaatgagcccactagggtacttactaaagaagataagtcctgatcaggacaaacagtacctatgttagcacagaagccctggagaggcaagggaacctttctgccctgcccagtctccagagggcaaagctgcccttccctcatcctctgcccctgaactttattctttctgaagacactccacagttttgcctcctacaagacctacttccttaactaagacatgagtccctctctgccctggtagcagcccaaggcaagaggtggcatatacattcaacaactgggcaggccacctaggtaacatttgcactgtcatgtcagcccagagtttcctcctgtccaggcgctacatgaggaccccatcaaccctgaggtgactggtggctgggcaggggagtgagcagggctctgaggtattgttggtccttcacctaatacgagagaacctcctgtggtgtatacagccactgacccatgtttcctttccccatagttcctgagccaagcatgctcagtacaagcatgatcaagtaacaaccggatttatccacccctgaggttcacacctccacggacaagctttttgctgctgtgaagacagtactaacctccaggtaccataaatctcagacttgtaacacagccctcattctttggctcatggccacgccctgcatccagtaatacacctgcacctcttagtatgagtaacgggtatgtatatgtgagttgtctgtgttcatgacatgccaatagagagtatagtcaaaagtcctgtcccagggacctttctgaagctgcattaagggagaagagcatacaacatagatcacagaagaacagttttccacacataagaggaagaaaagatataggtggaaggggaggggaagagaaaaagaaaattgagagaaaaaagaaaaagagagtgaatgaatagctaattagatcgcccatacacattttgttgttgttgttgttattgttgttgttatttcgtttaggaagttggtccctctactgtctccctcacccaagccaagaaggttagaactgagcccaggactttcaactgaccactacctcttgctcttatagtctatttatttttgtagtgctagggactgaagccagaaccttcctcatgcaaagcgaacattccactattcacttacatcccagcttctgtgttattgtttgcttttgttataaacatgaggtctctctttgcagaagctgaccttaaactactgggctcaagcaatcttcctgcctcagcctaccaggacctgaggctctccatatgtgtcaccaaaaccagctcagagcatttccttattgatccatggtagcacagggcagctaagatgcaagtctgaaggaggagtctggcgagctgctcctgcagttccctggacccagaaagatgagctagcagattcacttgagccaaaggattccaggccagcctggaaactagagcaagacctgctcacataaaaagaggaaaaggagaaagagggaaaagacaagaaaggaggagccaggggaggagacagtggacaaagaggaagagagaggaaagaggggagaaaagagagaaagagagtgtctctatggggtgctagcatcttatccttctttatctcatatccaggggctggggctgaggccagaaaggaaagtgtgaaacagggacccagagggagaggtggggggatgggcgctgctcagtttggtttgagggacttgcttctctgaccaaggtaggaggatactaacttcttcccaaactgccatcactggagacgtagtaaggggtaagaagtgtgtccgggcaactgataaggattccctgcacccaggggaagcacaacccagccccagaatctcaggggccctaacaagttttactgggtagagcaagcacaaaccagccaatgagaactgctccaagggcgtgtccaccctgcctggaggacacgcccttggagggcatataagtgctacttgctgcaggtccaagacacttctgattctgacagactcaggaagaaaccatggtgctctctggggaagacaaaagcaacatcaaggctgcctgggggaagattggtggccatggtgctgaatatggagctgaagccctggaaaggtgagaacaggaccttgatctgtaaggatcacaggatccaatatggacctggcactcgctcagtgggcagcttctaactatgcttttctgtgacctcaacttctcttctctccttctcccaggatgtttgctagcttccccaccaccaagacctacttccctcactttgatgtaagccacggctctgcccaggtcaagggtcacggcaagaaggtcgccgatgctctggccaatgctgcaggccacctcgatgacctgcccggtgccctgtctgctctgagcgacctgcatgcccacaagctgcgtgtggatcccgtcaacttcaaggtatgcgctgggacctggcaggcggcatctgggacccctaggaagggcttgggggtcctcgtgcccaaggcagggaacatagtggtcccaggaaggggagcagaggcatcagggtgtccactttgtctccgcagctcctgagccactgcctgctggtgaccttggctagccaccaccctgccgatttcacccccgcggtgcatgcctctctggataaattccttgcctctgtgagcaccgtgctgacctccaagtaccgttaagctgccttctgcggggcttgccttctggccatgcccttcttctctcccttgcacctgtacctcttggtctttgaataaagcctgagtaggaagaagcctgcatgcctggttctctgcgtctgcaaaggtgtcatgtttagtgtggggacgcttctagctcatttagccatggggcagtaaagacaaggttcagagcaaaaagcataattggatgcctacacacacacatatgtcttctgagtctgggcagcagtccctcccaagccctccactgacagccatgtgtcttctccttgagccaaagaagccaaagatcgtctttggagggtccttatcacaggccctctcagggagtgaactccttaatgtcgctggtactccagtgtgggatctactagaaaaacagtgaaaaatagacatcacatgagcatgtgggtaggcaatgggtaactcatataaaaatgcctgctcttgtcctctttcttccttccttcctttcatccttccttccttcctccctccctccctccctccctccctccctccctccctctctctctctctctctctctctctctttctttctttctttctttctttctttctcctttctttctttctttctttctcctttctctctttctttcttctcttctctctctctctctctctctctctctctctgtctctctctctctctctctttcttccattttttctttcagataaggcttcatgtagcacagtctggcctcaaaaacttttatatagataaggatgccctgaaactcttgatcctcttgtttctaccccatgagtgctgggtttttgatatgtgccttcatgtccagtttatgcattgcttgggaactgaactaaggctagtatatgtacttacatacatacatacatacatacatacacaagcattctactaactgaggtacatttgtacccctacatgagaatattcttcagctatttagagcaaagtgtaaattttttatacaatgtgtctgatccttaaaaaaaaaaaagtcaagtggaagaaaccaacagaacaaatgtcacacagtgcatagcttcatgtttgtaaaatatcaaaactgggggaatctgtagcgacagtatgtagcctcctggttgacagagccttttggtggaggttggatggttacaggtagtgggctagaggttttatttcagttagtaaaagttctgaaaatgcatagtagtgaagactgcacaagcttgtggatgaaggtgatgtcattgaggtgtacaaatccaggattgctataatgcacagggctttgttccacatagttctagttccagaacttgggagcctgaacatagtcacacacacacacacacaagaatagaatctttttaaaaaatacttatttatttattacatgtaagtacactgtagctgtctttagacaccccagaagagggcatcagatatcattgcagatgattgtgagccaccatgtggttgcttggatttgaactcatgacctttgaaagaacagtcagtgctcttaaccaatgagccatctctccagctctccctccccctttttaaagaacagaatctttagtgtactgatgttatactcaccaagagtgtttcgtagattcttgctgtcatcactgaaatatataatacgcactcttaagttcattgtcccaaaaggaattttccctatgacccaggcatataatatttttcatctacttaattctcacagctctgataagaatatatttttgaaacagacttagattttatttatttgaagaattatttattcattttaactatgtaagtacactgtagcagttttcagacaaaccagaagagggcatcagatagttttgagccaccatgtaattcttggtaattgaacccaggacctctggatgagcagtcccatcttcttaaccactgagccatctctccagcccccacagttggaatgtattaaaggggatttttatctgaagtggtttaggcagagtcagggtctcattatgtagcactgctggcctggagttccatatgtaggccaggatggtcctgaactcacagacatccttttacatctgcctccaagtgctaagattaacctgtacctgtgccacaagacccagattaaaagggatttttaatgtagatttaaatttccttcattttatttcacacgtgtgggtgtttgggctgcatggatatctgtgcatctcttgtatgactgtggaagacagaagagggcttggatctacctgacctgaatttacaggcaaatgtgagcaggcatgtttgtgctgtgaaccaaagccaggtactctgggagagcagttagtactctcaactgctgagccatttctccatcccctttaaatgtagatttaactatgatatttaacgaaaggagacgtgctccgggagagagagagagagagagagagagagagagagagagagagagagagagagagagagagagagagagagagagagagagagagagagagaagaccaagtatgggtatgggctcctgacaagagaattacactcagtccttttcaataatgaataagaaaggaaaatctgtgaagtttccgaaggactcgggaagcaggacgagctgacagtgccatatggacactaaaatccattgtaatcgatagtacatattagatgccaatgtgcatgtagtaaacactttaaaatgaaaggcttggagagggagcccagggaaacagagggctcaaagctgaaccagaatctgtgaacacctaggcatcctggaacgatgcagcgccccctggcggcctcttgtgtttcaggacatctttgagctcagccagggggcagagcgcaaggctcagttcattgaagatggctcggtcccaggatgatcagtggctggtccttgcgctctggaagaagatgggcagcaatgtcggaatctacacgaccgaggccttggagaggtacgccctcgggttcatcttccaacggactgcggggcgaagacgggctctctgtacctccgggtccggctgagcccaaccctgttttcctataggaccttcgtggctttcccctccaccaaaacctacttcccacacttggacctgaggccaggctctagccaggttaaagcccatgcccaaaaggtggccgatgcactgactctcgctacccagcacctggacgacctgcctgcttctctgtctgctctcagtgatctacatgcgcacaagctctgtgtggaccctgctaacttccaggtgagtcctgtattgagctctccccgggttgctggagatgtgggtcccttcaaggcttggtgtagggaagaaattaatgcaaggcggggcggttctctttcttcagttcttcagctgctgtctgctggtgactctcgccaggcactatcctggagacttcagcggcgaaaaagatgcatgtctccttggacacgtgtctgggtcatgtgacttttgcactggacttcaagtaatgctgaattgaggaagcagggcagcttattctccagtcatgcccttcctaaagcttacaatgtttgagtaaacttccccagggctgcattgcctctgtgcatgtgtgcctggtgtgtgatgctgctgtacatttgagcctggtgtgtcatgcctcggtgtatgtatgataggtgtttgataatgctgtacatgtgtgcctgatgtgtgatgctgctgtacatgtgttctttggttgtgatgccactttttatttatgattagtgtgtgatgcttctgtccatgtatgcctggtgtgtgatgtgtccgtacatgtgtatatgtgtgcctggtgtgtgataccgctgtacatgtgtacctgatatatgatgccactgtacatgtgtaacttgtatgtgatgcttctgtaatgtgtgcctggtgtggtatgccgctgtacatgtgaatatggtgtgtgatgccaatttacaggttttcctagttgtgatgtcactgtatatgtgtgactggtgtgtgatgctaatatacatgtgtgcttggcatgtagtgctattgtacatgtgtgtctggtgtgtgtggctgctgtacatgtgagcctgatgtatgatactgctgtacatgtgtttatggggttttatgccactgtataatatgactggtatatgatacctctatacatgtgtgcctggtgtgtgatgcctttgtacatgtgtgtctggtgtatgatgctgctgtacatgttttcttgcaatttgatgccagtgtatatttatgattggtggctgatacccttgtgcacatgtacctggtgtgtgattccactgtacaattgtacatgtgtacatgtgcacctcctgtttgatgctgctgtacatgtgtgcctggtgggtgatgccaatgtacttgtgtgcctggtgtgtgatactgctgtacatgtgttcttgcctttgaatgccactgtacgtttatgactggtgtgtggtaccattgtacatgtttacctggagtatgatgctgctgtacatgtgtacatatgtgcctagtgtgtggtgctgctgtacatgtatacctggtgtgtgatgcctctgtatatgtatgacaggtgtgtccccaaatgccaaggtcagcacaggtaagtataggctgatggacaagctgaaggagaatattgggttataccacctgattcaggcataaccagacttttctttgggaaccatgggttgaattcaagtgaggtcttctgctgaggtctgagatgggtctgtcctagcaatgccactaggatgttaagaatgaaggagacccatggctggaccttactcaggcatcctatagaaagcatacaccagcatttacgggtatccaggaccctcatgaatccgaatctgactctacatccttctacacatgaagagggtttacacctgctctagatggctcatcctttatctggctcttatctactcaatgcaaatgtggaggagacagtggcctggggtcttttaggaacaacagcaagaagcagcctgttcaggtttggcacagacacagttatttttctggatacctctgatgcacagatggctgaatccatgaattaggaactgaaggacaataggctgacatgcagtgatgaagaatggagcaactgccaccatagaaagaagatgggccagtctgcgtcactcccatggtgactgtatttctgtggctggaaaatgaaggggaggctgtaccaggtggggtccaggggaggccgtacggggtttgtagcagagacagacatagagagggaatcctcaggagggaatggagggtagagagtctagacacaggccctctggatacatgagcgcttttgcagcagagagaaccattgcaagtatttctaaattattgtagcaataaaaaattattacagtcttttaaaaaaaaacaatacaatacggcacaataactgcttatggtgtagaagaaattagggtgagtgaggttccatgagagttccctgggacactatattttcttcctatcctatccctgtgacatgggcatcattgtccacctgtaaagcttggtgtaagtaaggccaagagagatgaagcaggccagtgcccatggctccacagccagcaagcactgtagcccacttggaacctacttcattctggctggagaaggtgtctggagttcctgttttctgtcacatcttgccctgctttccacaggactgaagtctttcccctgtgaggggaagccacacagctgttttctcctggcagctgtgaggctggtctccaaggagtgagtacttgattgccagccctgggccttccaggaaagagtctgggagttacaggatccacccacccacactcttcctctgacatgggaaagtagacctagctttttcaagagaaagccctggctccgtgcattttcctttcttccccaaaagaggcaccctcaggccttacccactctctggaagggtgctactgggcctgccagcatcctcactgttgctaaggagctctgccagcatcctcactgttgctaaggagctctgctgctgtggctgtgaatcagcaaggccctacctatggactccaggctttacccctacagagttggcatacccaaaacccaggaaagctgatccaccatcgttttcaagacaggaaggtagaggttctaaaggaacctgtctaaggaggaaacctgactaaggggaagtgacttagctgaaagcctactcagtgcctctgcacaataatggttctttgaatgggctcaatccctctggtctcttgaaggttctaaccacagagctttgcctgcctccgagggtcatcaacttgggtgggactgacagaggtttgcatgcctggtagattcctgataggccctgagttccagcatccatccctctgtgcctgcttgttctgttcctgctaaccttgctctgaaacacctagccctgactgggaccaaggccaagtacagggccccaaaacaccctgctccagatccctactaagtaatgaaaagagggaaaatggagactggggtgggtgggtgggtgtggctgggtgcatctgggcctggagaacagatatctgtctcttggcaggtaaggcttggcactcttgaacttggagccccgacacttcctctattcaccacacagctcaaagaaagactggtatgttcttgcccatggctgtagacactgcaagcatcccctgcatcagccaggtgcagttgcctgcccggaccgatgaccccacagcctcttcattcagcacaataaagaacacttccttctttgtttttatgcaccatgttgggggactactttgtaatattccagcaggtaatttcaaaggtagggcagagcagtggaaaaacagtgggaaatgagctacaatgtttgaagcagagtgatgatgaccgtggtacgatgctgattccctcttttgtgtgtggtatgcttctctctccctcctgcaaaactcaatgctcacactccgggtttgtaggtctcctaggtggcctttgccagtgctttctcttggaaacagatctcggcttctctccaccattgtgtgacctcagggctttcatagtgacatgcaaatagcagaccaggagaaaggaaaatggcaatccactacttaccctttgcgtccacattacattggtgagaactagtcacatgacaggcaccgccaccgtattctatgaagaccttgtcgggcagctgactatcttgggatggctccagccatgtcaagggtaatggccaaagggttgggaacaaggtcttcaaaggtattccattacaatagaatgttcattctcttggagggaaagaaggcagcagaggaaaagccttgggccaccagaggtccccacatcccccctttaaaacactggtgcccatcactatgtccacccttcacatctaaagtgccaaaagatttgttttgcaaaacattgctgttgaggagaaatgggttcaagatacacagatctctgaattatttcactgtgtaaaaattgaccattatctctaagttttcaactaaggaggtggggagtctcatttgacttctgtctctgtgataaacatggtgagcagggccagattggggtgggaaggatctgggttgggttgggttgggaaggatctgggttgggttgggttgggttgggttttctgcttacggatccatcattgggggaagcaaaagcaggagctcgagggcgaattcagaagaaaccgaagcaggggcggcatgggagtactaactgcttacttccctaggtttgctacctttttaatacagccaggaccacccagctagggatagttctagccacatttgaggagacactctcacatcaatcagcaaccaaaaatatgccctacagacgtgtctgcaatacagcctctgtccaggtatggctgggtatgtgtcaagttgattaaaaaataaaaaagttgacaggcagagagcatgtgtgtgtgtgtgtgtgtgtgtgtgtgtgtgtgtacatacacatgtgtggtggcttgaatacaaatggccctcatagactcacataagttgaatacttaggcacaagtcagtggacctacttgagaatgattaggaggtctggcagggaggaagtgtatcactgagagggggctttgaggcgtcaaaaggccttggcaggcccagcctctctctgtctctcctgcctctgtctctctgtctctctgtctttctgtctttctctgtgtgtatgtctttgcctctctctctctctctctctctctctctctctctctctgtatatctttgcctttctctctctgtctctgtctctgtctcttcacctgctgcctttggatcaggatgtaaagtttccagctactggtctagcactatgcctgtctgcttccaccccattgatgtttatggactaaacttcagaaactgtaattaagctcccaattaaatctttcttctataagagttgtcatagtcatggtatcttctcacaacaatagaaccgtaactaagatgtgtgtgcatgcatgcacacatatgtgtgccagaccacaagcatgtgctttatcactgagctatcccctgggctctagaatatattcttaaatccctctttccttatacaaaagcagcagacattgtactagcctgcccttctttatacatgtatctcgaagactttcctaagctaattaccagtagatctcttgactttggtcctgatttgtctttgcttatatcatcatgtatctaaccagtccattactgttggaatttgaggtcataagactgagaggaaggtgactggtcacatagccaagaagtagaaaaaaagagcttgtgttttgtgacctttctggggagacatgaacaaatgtctgctcatcccagagagatgccaacaaaagatccagaaacaattccatccaagtcttgtttaatgggccactgaatttaactcacaagaatatgggcaacttacagctcctacgactataagaagagtctttgcccacagcaactctttataactggtttatcagaggtaggggtgagaacctgatgagtcctcctgcacacgttcttctgactcacgagcccttctccctgccatgagggactgtcaaaggaccagatcttgtgagggtcttgtgtgggtgatcaaagatgctctagtttcaaattggcaatggccatgtaacacacagaggactgagctctgcagctgctggtttgcaagggttatcctccccctttctctgtgtatctctgtacatcagctccttgggaaggggctgccatgatggtcagctctcttggcccagaaagtctgagtctgaggtggtactcagtgttaggtcaggaggatcaggtcagttgaggctacttggactgtcgccttggcccttctgctgagccctacctgaccctggccatgaaacatgatctccttccccctcaatgactgtctatttctccaggggaaggagactggtggaagcaatagggaggggttcacttatggcactgtctcatgatttaggggtggcatattctgaatctggaaagtggccactagaatggagagctattgttctttggtgcagatggagtgcccaatcttaggaaagaggtatcagtctttgctttcagggtttcaggagacagtgtgtactcccatgagattaggggcgatgtcttccatgtattagtggcctctaaaaagtgcctatggcaacatctagactctatgggataagctgggctcagtggctcagctaaagtgacacattcaagtagccttcccagcagtcacagcagaagcttaggatctggcacagcacagggccatatctacatcagtctgccagctgtggagagatagtctctgaggatgcttaggggtggagagggtgaggatactgtatggggccctaaggagctcagacaggggctatgagagactggtgatcacagtaacaaggcaggcccagaggctgtgcaaccccggggctgagggctgagccatgggtggcttcctagagaatgggacaaaagaaatcatttcccaactaccaagaggaagcaggtgggtgaagacggatgccaggaagcagagggcatcccaagccgaggacagacaaacatggaactgcaaaagcttgagagaggccaggcaccagaggagaggactgacagtttgggaggctaaggagccagcccaggttgtttgttgccctttgtcctggaaggactggtatcttcaatagctccagctctgcactaagccttaccaatgcccccccacccccacccacacacacacacacactcaggcagtaagggcaggaggtggctgtcccaagtcttctacactgccagacctccatatatgtcaaccctgcctctgcagatacaaccaaccttgatcaaaaatatttatgtccatatgcatctgtataagacatgtagggactctgaaatatcaccgctgtccccaaaagccagtctaagaatagctgcattcacatctcctccataggtgctgtgagccatctagagatggcttaaagtataagctacacgcaaacactatgctgcttttagtagacctgtggatcttagtacccgtagggagcttgggaacctcccctgcccatactgagaaacaactgcagagaaaagtcacgcaaggctggaagtggtgggctgagtccaaacagctggccccagggcccaaggtagggggtgggggacagggactcatgaataattgcagggtcctgggaagaatggcttggaggctgggtggagggtttatagaatctgagacagcaaagaaagccctgtgggggttgggagcaactctgggtggccatgccagagacagacttagaacatggcagaagtcagctttgtcagggtactgttcatggagcaggcccaggctaggtaccccagggtctcaaagagaccatagtcattttccttagaagggacctaaggctatgttggctaggcaaccctcagctgtgagggaagttaggcaaacagatgttccagctgcctgtattgtcaccccagttaaagcagagttttgttagcaaggatgagctggaagttgacagtgtacagtcttagaaagatcaagatagtagcccaaattgacatgaatcaagaatgacaactgagtcttacatggactgtatccagggtcacagtgagcacacacacccacacgtgtatacatattcacatgcatacacatccacaaaagcatgcacacacatgcacatatatacccagacacacacctccatacacatgcacattcatacacatacacaggcatacacacgcacacacatgcatattcacacacaatggcatgtgcacacacacacgcacacatgtgcatacacatgcacatacatatacatatacacactcacacacagacacgcacacacacatgcacacacatgcatgcacacacatgcatacattcacatacacatgcacacacacagactcacacacacacacatgcacacacatgcatatattcacatacataagcacatgtacacacacacatactcatccacgggctcagtggctcccaggaatcccagcaatctgttcatgccctattcattgcccatttgtccttccaacctcctggtccctgccccaccatgactctgatgtgtaatttattccctaggctagcctgcttcaattgctccgttcttggccacagtccgcacccacccgaaacttgtttctaatttttaactgtggtcccttccagagcttctgccctctagaccttcatcccccaccactttcccagaaggtccctaagacccaaaggccagagagacagaatgacatcatatgtgctgtggccctcactgggccccaattatccagctattagtggaaatgcctcacattttcccacaggaaatcaccctcccggtacccaaatc

SEQ ID NO: 44 - DNA, 24815 bp, Mus musculus
gatttgggtaccgggagggtgatttcctgtgggaaaatgtgaggcatttccactaatagctggataattggggcccagtgagggccacagcacatatgatgtcattctgtctctctggcctttgggtcttagggaccttctgggaaagtggtgggggatgaaggtctagagggcagaagctctggaagggaccacagttaaaaattagaaacaagtttcgggtgggtgcggactgtggccaagaacggagcaattgaagcaggctagcctagggaataaattacacatcagagtcatggtggggcagggaccaggaggttggaaggacaaatgggcaatgaatagggcatgaacagattgctgggattcctgggagccactgagcccgtggatgagtatgtgtgtgtgtacatgtgcttatgtatgtgaatatatgcatgtgtgtgcatgtgtgtgtgtgtgagtctgtgtgtgtgcatgtgtatgtgaatgtatgcatgtgtgtgcatgcatgtgtgtgcatgtgtgtgtgcgtgtctgtgtgtgagtgtgtatatgtatatgtatgtgcatgtgtatgcacatgtgtgcgtgtgtgtgtgcacatgccattgtgtgtgaatatgcatgtgtgtgcgtgtgtatgcctgtgtatgtgtatgaatgtgcatgtgtatggaggtgtgtgtctgggtatatatgtgcatgtgtgtgcatgcttttgtggatgtgtatgcatgtgaatatgtatacacgtgtgggtgtgtgtgctcactgtgaccctggatacagtccatgtaagactcagttgtcattcttgattcatgtcaatttgggctactatcttgatctttctaagactgtacactgtcaacttccagctcatccttgctaacaaaactctgctttaactggggtgacaatacaggcagctggaacatctgtttgcctaacttccctcacagctgagggttgcctagccaacatagccttaggtcccttctaaggaaaatgactatggtctctttgagaccctggggtacctagcctgggcctgctccatgaacagtaccctgacaaagctgacttctgccatgttctaagtctgtctctggcatggccacccagagttgctcccaacccccacagggctttctttgctgtctcagattctataaaccctccacccagcctccaagccattcttcccaggaccctgcaattattcatgagtccctgtcccccaccccctaccttgggccctggggccagctgtttggactcagcccaccacttccagccttgcgtgacttttctctgcagttgtttctcagtatgggcaggggaggttcccaagctccctacgggtactaagatccacaggtctactaaaagcagcatagtgtttgcgtgtagcttatactttaagccatctctagatggctcacagcacctatggaggagatgtgaatgcagctattcttagactggcttttggggacagcggtgatatttcagagtccctacatgtcttatacagatgcatatggacataaatatttttgatcaaggttggttgtatctgcagaggcagggttgacatatatggaggtctggcagtgtagaagacttgggacagccacctcctgcccttactgcctgagtgtgtgtgtgtgtgtgggtgggggtgggggggcattggtaaggcttagtgcagagctggagctattgaagataccagtccttccaggacaaagggcaacaaacaacctgggctggctccttagcctcccaaactgtcagtcctctcctctggtgcctggcctctctcaagcttttgcagttccatgtttgtctgtcctcggcttgggatgccctctgcttcctggcatccgtcttcacccacctgcttcctcttggtagttgggaaatgatttcttttgtcccattctctaggaagccacccatggctcagccctcagccccggggttgcacagcctctgggcctgccttgttactgtgatcaccagtctctcatagcccctgtctgagctccttagggccccatacagtatcctcaccctctccacccctaagcatcctcagagactatctctccacagctggcagactgatgtagatatggccctgtgctgtgccagatcctaagcttctgctgtgactgctgggaaggctacttgaatgtgtcactttagctgagccactgagcccagcttatcccatagagtctagatgttgccataggcactttttagaggccactaatacatggaagacatcgcccctaatctcatgggagtacacactgtctcctgaaaccctgaaagcaaagactgatacctctttcctaagattgggcactccatctgcaccaaagaacaatagctctccattctagtggccactttccagattcagaatatgccacccctaaatcatgagacagtgccataagtgaacccctccctattgcttccaccagtctccttcccctggagaaatagacagtcattgagggggaaggagatcatgtttcatggccagggtcaggtagggctcagcagaagggccaaggcgacagtccaagtagcctcaactgacctgatcctcctgacctaacactgagtaccacctcagactcagactttctgggccaagagagctgaccatcatggcagccccttcccaaggagctgatgtacagagatacacagagaaagggggaggataacccttgcaaaccagcagctgcagagctcagtcctctgtgtgttacatggccattgccaatttgaaactagagcatctttgatcacccacacaagaccctcacaagatctggtcctttgacagtccctcatggcagggagaagggctcgtgagtcagaagaacgtgtgcaggaggactcatcaggttctcacccctacctctgataaaccagttataaagagttgctgtgggcaaagactcttcttatagtcgtaggagctgtaagttgcccatattcttgtgagttaaattcagtggcccattaaacaagacttggatggaattgtttctggatcttttgttggcatctctctgggatgagcagacatttgttcatgtctccccagaaaggtcacaaaacacaagctctttttttctacttcttggctatgtgaccagtcaccttcctctcagtcttatgacctcaaattccaacagtaatggactggttagatacatgatgatataagcaaagacaaatcaggaccaaagtcaagagatctactggtaattagcttaggaaagtcttcgagatacatgtataaagaagggcaggctagtacaatgtctgctgcttttgtataaggaaagagggatttaagaatatattctagagcccaggggatagctcagtgataaagcacatgcttgtggtctggcacacatatgtgtgcatgcatgcacacacatcttagttacggttctattgttgtgagaagataccatgactatgacaactcttatagaagaaagatttaattgggagcttaattacagtttctgaagtttagtccataaacatcaatggggtggaagcagacaggcatagtgctagaccagtagctggaaactttacatcctgatccaaaggcagcaggtgaagagacagagacagagacagagagagaaaggcaaagatatacagagagagagagagagagagagagagagagagagagaggcaaagacatacacacagagaaagacagaaagacagagagacagagagacagaggcaggagagacagagagaggctgggcctgccaaggccttttgacgcctcaaagccccctctcagtgatacacttcctccctgccagacctcctaatcattctcaagtaggtccactgacttgtgcctaagtattcaacttatgtgagtctatgagggccatttgtattcaagccaccacacatgtgtatgtacacacacacacacacacacacacacacacacacatgctctctgcctgtcaacttttttattttttaatcaacttgacacatacccagccatacctggacagaggctgtattgcagacacgtctgtagggcatatttttggttgctgattgatgtgagagtgtctcctcaaatgtggctagaactatccctagctgggtggtcctggctgtattaaaaaggtagcaaacctagggaagtaagcagttagtactcccatgccgcccctgcttcggtttcttctgaattcgccctcgagctcctgcttttgcttcccccaatgatggatccgtaagcagaaaacccaacccaacccaacccaacccagatccttcccaacccaacccaacccagatccttcccaccccaatctggccctgctcaccatgtttatcacagagacagaagtcaaatgagactccccacctccttagttgaaaacttagagataatggtcaatttttacacagtgaaataattcagagatctgtgtatcttgaacccatttctcctcaacagcaatgttttgcaaaacaaatcttttggcactttagatgtgaagggtggacatagtgatgggcaccagtgttttaaaggggggatgtggggacctctggtggcccaaggcttttcctctgctgccttctttccctccaagagaatgaacattctattgtaatggaatacctttgaagaccttgttcccaaccctttggccattacccttgacatggctggagccatcccaagatagtcagctgcccgacaaggtcttcatagaatacggtggcggtgcctgtcatgtgactagttctcaccaatgtaatgtggacgcaaagggtaagtagtggattgccattttcctttctcctggtctgctatttgcatgtcactatgaaagccctgaggtcacacaatggtggagagaagccgagatctgtttccaagagaaagcactggcaaaggccacctaggagacctacaaacccggagtgtgagcattgagttttgcaggagggagagagaagcataccacacacaaaagagggaatcagcatcgtaccacggtcatcatcactctgcttcaaacattgtagctcatttcccactgtttttccactgctctgccctacctttgaaattacctgctggaatattacaaagtagtcccccaacatggtgcataaaaacaaagaaggaagtgttctttattgtgctgaatgaagaggctgtggggtcatcggtccgggcaggcaactgcacctggctgatgcaggggatgcttgcagtgtctacagccatgggcaagaacataccagtctttctttgagctgtgtggtgaatagaggaagtgtcggggctccaagttcaagagtgccaagccttacctgccaagagacagatatctgttctccaggcccagatgcacccagccacacccacccacccaccccagtctccattttccctcttttcattacttagtagggatctggagcagggtgttttggggccctgtacttggccttggtcccagtcagggctaggtgtttcagagcaaggttagcaggaacagaacaagcaggcacagagggatggatgctggaactcagggcctatcaggaatctaccaggcatgcaaacctctgtcagtcccacccaagttgatgaccctcggaggcaggcaaagctctgtggttagaaccttcaagagaccagagggattgagcccattcaaagaaccattattgtgcagaggcactgagtaggctttcagctaagtcacttccccttagtcaggtttcctccttagacaggttcctttagaacctctaccttcctgtcttgaaaacgatggtggatcagctttcctgggttttgggtatgccaactctgtaggggtaaagcctggagtccataggtagggccttgctgattcacagccacagcagcagagctccttagcaacagtgaggatgctggcagagctccttagcaacagtgaggatgctggcaggcccagtagcacccttccagagagtgggtaaggcctgagggtgcctcttttggggaagaaaggaaaatgcacggagccagggctttctcttgaaaaagctaggtctactttcccatgtcagaggaagagtgtgggtgggtggatcctgtaactcccagactctttcctggaaggcccagggctggcaatcaagtactcactccttggagaccagcctcacagctgccaggagaaaacagctgtgtggcttcccctcacaggggaaagacttcagtcctgtggaaagcagggcaagatgtgacagaaaacaggaactccagacaccttctccagccagaatgaagtaggttccaagtgggctacagtgcttgctggctgtggagccatgggcactggcctgcttcatctctcttggccttacttacaccaagctttacaggtggacaatgatgcccatgtcacagggataggataggaagaaaatatagtgtcccagggaactctcatggaacctcactcaccctaatttcttctacaccataagcagttattgtgccgtattgtattgtttttttttaaaagactgtaataattttttattgctacaataatttagaaatacttgcaatggttctctctgctgcaaaagcgctcatgtatccagagggcctgtgtctagactctctaccctccattccctcctgaggattccctctctatgtctgtctctgctacaaaccccgtacggcctcccctggaccccacctggtacagcctccccttcattttccagccacagaaatacagtcaccatgggagtgacgcagactggcccatcttctttctatggtggcagttgctccattcttcatcactgcatgtcagcctattgtccttcagttcctaattcatggattcagccatctgtgcatcagaggtatccagaaaaataactgtgtctgtgccaaacctgaacaggctgcttcttgctgttgttcctaaaagaccccaggccactgtctcctccacatttgcattgagtagataagagccagataaaggatgagccatctagagcaggtgtaaaccctcttcatgtgtagaaggatgtagagtcagattcggattcatgagggtcctggatacccgtaaatgctggtgtatgctttctataggatgcctgagtaaggtccagccatgggtctccttcattcttaacatcctagtggcattgctaggacagacccatctcagacctcagcagaagacctcacttgaattcaacccatggttcccaaagaaaagtctggttatgcctgaatcaggtggtataacccaatattctccttcagcttgtccatcagcctatacttacctgtgctgaccttggcatttggggacacacctgtcatacatatacagaggcatcacacaccaggtatacatgtacagcagcaccacacactaggcacatatgtacacatgtacagcagcatcatactccaggtaaacatgtacaatggtaccacacaccagtcataaacgtacagtggcattcaaaggcaagaacacatgtacagcagtatcacacaccaggcacacaagtacattggcatcacccaccaggcacacatgtacagcagcatcaaacaggaggtgcacatgtacacatgtacaattgtacagtggaatcacacaccaggtacatgtgcacaagggtatcagccaccaatcataaatatacactggcatcaaattgcaagaaaacatgtacagcagcatcatacaccagacacacatgtacaaaggcatcacacaccaggcacacatgtatagaggtatcatataccagtcatattatacagtggcataaaaccccataaacacatgtacagcagtatcatacatcaggctcacatgtacagcagccacacacaccagacacacatgtacaatagcactacatgccaagcacacatgtatattagcatcacacaccagtcacacatatacagtgacatcacaactaggaaaacctgtaaattggcatcacacaccatattcacatgtacagcggcataccacaccaggcacacattacagaagcatcacatacaagttacacatgtacagtggcatcatatatcaggtacacatgtacagcggtatcacacaccaggcacacatatacacatgtacggacacatcacacaccaggcatacatggacagaagcatcacacactaatcataaataaaaagtggcatcacaaccaaagaacacatgtacagcagcatcacacatcaggcacacatgtacagcattatcaaacacctatcatacatacaccgaggcatgacacaccaggctcaaatgtacagcagcatcacacaccaggcacacatgcacagaggcaatgcagccctggggaagtttactcaaacattgtaagctttaggaagggcatgactggagaataagctgccctgcttcctcaattcagcattacttgaagtccagtgcaaaagtcacatgacccagacacgtgtccaaggagacatgcatctttttcgccgctgaagtctccaggatagtgcctggcgagagtcaccagcagacagcagctgaagaactgaagaaagagaaccgccccgccttgcattaatttcttccctacaccaagccttgaagggacccacatctccagcaacccggggagagctcaatacaggactcacctggaagttagcagggtccacacagagcttgtgcgcatgtagatcactgagagcagacagagaagcaggcaggtcgtccaggtgctgggtagcgagagtcagtgcatcggccaccttttgggcatgggctttaacctggctagagcctggcctcaggtccaagtgtgggaagtaggttttggtggaggggaaagccacgaaggtcctataggaaaacagggttgggctcagccggacccggaggtacagagagcccgtcttcgccccgcagtccgttggaagatgaacccgagggcgtacctctccaaggcctcggtcgtgtagattccgacattgctgcccatcttcttccagagcgcaaggaccagccactgatcatcctgggaccgagccatcttcaatgaactgagccttgcgctctgccccctggctgagctcaaagatgtcctgaaacacaagaggccgccagggggcgctgcatcgttccaggatgcctaggtgttcacagattctggttcagctttgagccctctgtttccctgggctccctctccaagcctttcattttaaagtgtttactacatgcacattggcatctaatatgtactatcgattacaatggattttagtgtccatatggcactgtcagctcgtcctgcttcccgagtccttcggaaacttcacagattttcctttcttattcattattgaaaaggactgagtgtaattctcttgtcaggagcccatacccatacttggtcttctctctctctctctctctctctctctctctctctctctctctctctctctctctctctctctctctctctctctctctctctctctctcccggagcacgtctcctttcgttaaatatcatagttaaatctacatttaaaggggatggagaaatggctcagcagttgagagtactaactgctctcccagagtacctggctttggttcacagcacaaacatgcctgctcacatttgcctgtaaattcaggtcaggtagatccaagccctcttctgtcttccacagtcatacaagagatgcacagatatccatgcagcccaaacacccacacgtgtgaaataaaatgaaggaaatttaaatctacattaaaaatcccttttaatctgggtcttgtggcacaggtacaggttaatcttagcacttggaggcagatgtaaaaggatgtctgtgagttcaggaccatcctggcctacatatggaactccaggccagcagtgctacataatgagaccctgactctgcctaaaccacttcagataaaaatcccctttaatacattccaactgtgggggctggagagatggctcagtggttaagaagatgggactgctcatccagaggtcctgggttcaattaccaagaattacatggtggctcaaaactatctgatgccctcttctggtttgtctgaaaactgctacagtgtacttacatagttaaaatgaataaataattcttcaaataaataaaatctaagtctgtttcaaaaatatattcttatcagagctgtgagaattaagtagatgaaaaatattatatgcctgggtcatagggaaaattccttttgggacaatgaacttaagagtgcgtattatatatttcagtgatgacagcaagaatctacgaaacactcttggtgagtataacatcagtacactaaagattctgttctttaaaaagggggagggagagctggagagatggctcattggttaagagcactgactgttctttcaaaggtcatgagttcaaatccaagcaaccacatggtggctcacaatcatctgcaatgatatctgatgccctcttctggggtgtctaaagacagctacagtgtacttacatgtaataaataaataagtattttttaaaaagattctattcttgtgtgtgtgtgtgtgtgactatgttcaggctcccaagttctggaactagaactatgtggaacaaagccctgtgcattatagcaatcctggatttgtacacctcaatgacatcaccttcatccacaagcttgtgcagtcttcactactatgcattttcagaacttttactaactgaaataaaacctctagcccactacctgtaaccatccaacctccaccaaaaggctctgtcaaccaggaggctacatactgtcgctacagattcccccagttttgatattttacaaacatgaagctatgcactgtgtgacatttgttctgttggtttcttccacttgacttttttttttttaaggatcagacacattgtataaaaaatttacactttgctctaaatagctgaagaatattctcatgtaggggtacaaatgtacctcagttagtagaatgcttgtgtatgtatgtatgtatgtatgtatgtaagtacatatactagccttagttcagttcccaagcaatgcataaactggacatgaaggcacatatcaaaaacccagcactcatggggtagaaacaagaggatcaagagtttcagggcatccttatctatataaaagtttttgaggccagactgtgctacatgaagccttatctgaaagaaaaaatggaagaaagagagagagagagagagacagagagagagagagagagagagagagagagaagagaagaaagaaagagagaaaggagaaagaaagaaagaaagaaaggagaaagaaagaaagaaagaaagaaagaaagagagagagagagagagagagagagagggagggagggagggagggagggagggagggagggaggaaggaaggaaggatgaaaggaaggaaggaagaaagaggacaagagcaggcatttttatatgagttacccattgcctacccacatgctcatgtgatgtctatttttcactgtttttctagtagatcccacactggagtaccagcgacattaaggagttcactccctgagagggcctgtgataaggaccctccaaagacgatctttggcttctttggctcaaggagaagacacatggctgtcagtggagggcttgggagggactgctgcccagactcagaagacatatgtgtgtgtgtaggcatccaattatgctttttgctctgaaccttgtctttactgccccatggctaaatgagctagaagcgtccccacactaaacatgacacctttgcagacgcagagaaccaggcatgcaggcttcttcctactcaggctttattcaaagaccaagaggtacaggtgcaagggagagaagaagggcatggccagaaggcaagccccgcagaaggcagcttaacggtacttggaggtcagcacggtgctcacagaggcaaggaatttatccagagaggcatgcaccgcgggggtgaaatcggcagggtggtggctagccaaggtcaccagcaggcagtggctcaggagctgcggagacaaagtggacaccctgatgcctctgctccccttcctgggaccactatgttccctgccttgggcacgaggacccccaagcccttcctaggggtcccagatgccgcctgccaggtcccagcgcataccttgaagttgacgggatccacacgcagcttgtgggcatgcaggtcgctcagagcagacagggcaccgggcaggtcatcgaggtggcctgcagcattggccagagcatcggcgaccttcttgccgtgacccttgacctgggcagagccgtggcttacatcaaagtgagggaagtaggtcttggtggtggggaagctagcaaacatcctgggagaaggagagaagagaagttgaggtcacagaaaagcatagttagaagctgcccactgagcgagtgccaggtccatattggatcctgtgatccttacagatcaaggtcctgttctcacctttccagggcttcagctccatattcagcaccatggccaccaatcttcccccaggcagccttgatgttgcttttgtcttccccagagagcaccatggtttcttcctgagtctgtcagaatcagaagtgtcttggacctgcagcaagtagcacttatatgccctccaagggcgtgtcctccaggcagggtggacacgcccttggagcagttctcattggctggtttgtgcttgctctacccagtaaaacttgttagggcccctgagattctggggctgggttgtgcttcccctgggtgcagggaatccttatcagttgcccggacacacttcttaccccttactacgtctccagtgatggcagtttgggaagaagttagtatcctcctaccttggtcagagaagcaagtccctcaaaccaaactgagcagcgcccatccccccacctctccctctgggtccctgtttcacactttcctttctggcctcagccccagcccctggatatgagataaagaaggataagatgctagcaccccatagagacactctctttctctcttttctcccctctttcctctctcttcctctttgtccactgtctcctcccctggctcctcctttcttgtcttttccctctttctccttttcctctttttatgtgagcaggtcttgctctagtttccaggctggcctggaatcctttggctcaagtgaatctgctagctcatctttctgggtccagggaactgcaggagcagctcgccagactcctccttcagacttgcatcttagctgccctgtgctaccatggatcaataaggaaatgctctgagctggttttggtgacacatatggagagcctcaggtcctggtaggctgaggcaggaagattgcttgagcccagtagtttaaggtcagcttctgcaaagagagacctcatgtttataacaaaagcaaacaataacacagaagctgggatgtaagtgaatagtggaatgttcgctttgcatgaggaaggttctggcttcagtccctagcactacaaaaataaatagactataagagcaagaggtagtggtcagttgaaagtcctgggctcagttctaaccttcttggcttgggtgagggagacagtagagggaccaacttcctaaacgaaataacaacaacaataacaacaacaacaacaaaatgtgtatgggcgatctaattagctattcattcactctctttttcttttttctctcaattttctttttctcttcccctccccttccacctatatcttttcttcctcttatgtgtggaaaactgttcttctgtgatctatgttgtatgctcttctcccttaatgcagcttcagaaaggtccctgggacaggacttttgactatactctctattggcatgtcatgaacacagacaactcacatatacatacccgttactcatactaagaggtgcaggtgtattactggatgcagggcgtggccatgagccaaagaatgagggctgtgttacaagtctgagatttatggtacctggaggttagtactgtcttcacagcagcaaaaagcttgtccgtggaggtgtgaacctcaggggtggataaatccggttgttacttgatcatgcttgtactgagcatgcttggctcaggaactatggggaaaggaaacatgggtcagtggctgtatacaccacaggaggttctctcgtattaggtgaaggaccaacaatacctcagagccctgctcactcccctgcccagccaccagtcacctcagggttgatggggtcctcatgtagcgcctggacaggaggaaactctgggctgacatgacagtgcaaatgttacctaggtggcctgcccagttgttgaatgtatatgccacctcttgccttgggctgctaccagggcagagagggactcatgtcttagttaaggaagtaggtcttgtaggaggcaaaactgtggagtgtcttcagaaagaataaagttcaggggcagaggatgagggaagggcagctttgccctctggagactgggcagggcagaaaggttcccttgcctctccagggcttctgtgctaacataggtactgtttgtcctgatcaggacttatcttctttagtaagtaccctagtgggctcattactagagtgtgcttcagtaccagattgctggatgcacacagaactgggcaatttatatctaggtagggtgggcatgtgtgagggcatcaactctcagcttggccacatccttggctacttccagcttacaccgcagggtagtgtccatggtgagctggcatcaccttgttcactgaccccagccttaggttcagatggttcgtcccctttcctgctcctgctcccctagagacaggtgtctggaaagaaaacttgggcctttgtctggggcacagaagctcagcctttggccgaactgtcccgcatcatttcgcctagtctgtgcctaacgtctatgcaacccccaactcaggcttcgtactggctctgaggacaagaaggataagatgttgggggacttagaggtagaaggaatggctgcccctggctgtggtagaggtggtgggctgctccttgggggtggagtttcagggaagggctcccctctttctggatactgtttgagtctctcctccttgagattcttacatggtgtcttagtcataaagcagtcaaattcctctccttctcaccttccttttccctcctcactcttctctcctttcttctccctatccctcctgcactccttaccgccctcctctcctgtcctccacacaccatcctccctttctctcttcctcccttccttcaaccctccttcccttcagagtcatctttgtttacactgagtgaagacactgggctcattcccaacgtttacttctgccttttctgggtagagcgatatgacagagtgactcttcctactgataacacaaaagggtgtgaaagcctgggtggacttcagcttcttccttccttccttccttccttccttccttccttccttccttccttccttccttccttcctttttccttccttccttcctttctttctttctttctttctttctctctctctctctctctctctctctctctctctctctctctctctctttctttctttctttctttctttctctctctcttttttttttccagacagggtttctctacatagctctggctgtcctggaactcactctgtagaccaggctggcctctaattcagaaatctgcctgtctctgcctctcgagtgctgggattaaaggcatgcaccaccactgctcaatttagcttttttcttatgtgtttttctacacacaaataaaaaggaggtggctagggccgggcagtggtggcacacgcctttaatcccagcacttgggaggcagagacaggcagatttctgagtttgaggccagcctggtctacagagtgagttccaggacagccagggctacacagagaaaccctgtctcaaaaaaaaaaaaaaaaaaaggaggtggctgcagagatgactcagcactgaaggatgcttgctgccctttctgagggcctgtgtttggttccccagactcaaatgaggtggatcagagctacctgtgacagtagctccagcttctggagatttgacaccccacttgtgaccttcgtggtacacacacacacacacacacacacacacacacacacacggcctacatagaaacatttatgcacataatcaaaaatataatgaacatgattcggctgtaaggaaagaagtctacagggagaggaaggaactacctaggggttcagagcagtccttgcccagaaactagggaacgtggtacagtgaatgtggtgtttgccacctcccgggaagctgtatccactgcaacttacactggctccttctgagaaaagcctggaaagttagatcatgttctagaatacactagccaggcagactgggatgccagcctggagccagtggccttcaagccaggacaaggatatttctggatgctgctaagagccagggaagcagagggaaatctcaggagggaagcttctgtgcccgagaccagagctcagactcctttctgaccagctgcatcttacagcagcctgctgcttaacagcacttgcattcagaccgaagctactacccccatctttccccagcccgcgcctgcacaggcaacattgctgggctagtcgaggatgcagtacacaaatatacactcactgtttatgtttgtttttaaagacagagtctccctggcttggaacttgctctgtagaccaggcaggtcctgaactgacagcgatctctctactcctgccttgggatgctctgattaaaaacgtgaaagcacacccatccctttccatttactttgataagatttttgtcatatgctatttgttcctgaagtttacctcattatttttttagagatttatttaactaaagaatatatagctggttgtagtggctgaaggttttaatctgaatacagaagattagaacgcagaggtaagtggatcttggtgagttccgggctaggctagtgtaaaattgagttccaggacagtcaggaagtcatacagagaaatctcccccccctccccctatatgtgtttatgtatatgtgtgtgtgtctgtgtgtatgtctgtgtgtgtgtctgtgtgtgtatgtgtgtctgggtctgggtatgggtatatgtgtatgtgtatgtattggtttttgtgtatggatggctgtttagagcacttgctgctcttgtggaggacctggattcagtttgcagaacctacagtggtggctcataactatgtataactccagttcctggagacctgacacactcttctgacctctatggtcaccaggcacaaacttggtgtgcagccacaagcaggcaaaacatccatacacataaaacaattaaagatgattttatctgcccggcagtggtggcgcgcgcctttaatctcagcacttgggagactgaagcaggcgaatttctgagttcaaggccagcctggtctacagagtgagttccaggacagccaggactacacacacacacacacacacacacacacacacaatgcctttgtgaagttgtcagtggaagagtagaagccagaggcatcagatttccctgcaacactccagccttccttgtttatttatttctttaattttaattttgaggcaaggcctcaacaagagcccttgttgggtttagtactcactgtgtggaatactgtggtcttgaactcacagagatccaccagcctctgtcttcaagatgctggattaaagacgtattctaccacacattgccctgttttgttttacaatgtgtgacagccagggctgcagagatggttcagagcctaggaccgctggctgctttcccacaggacttgggtttgatttccagaacccccatgacaactcataaccatctcatcttgagctccaggggaatctaacgtattaatccaaagttaccaagcttctaaacttatgtacagaaatgggtctatgtctgtagcaccagcttctagactgcaaggacacaacatgcaaaacatccatacaggtaaaaaatataaaattaagcccggcggtggtggagcaagcctttaatcccagcacttgggaggcagaggcaggtggatttctgagttcgaggccagcctggtctacaaagtgagttccaggacagccaggtctacacagagaaaccctgcctcgaaaaaccaaaataaataaataaataaataaataaataattatatatagaaagaatttcaagccagccttatctacatggcttgttccagatcagtagagataactgtaagaactacccatcagttttagtgtccatctgtgcatgtgtgaatgctggtgcctgtggagtactgaagacaacatggaatcaatcaatctcctttttaaaaagatttatttatttattattcatttgggtaaacggcagctgtcatcagacacacactagaagagtacattggtcaccattacagattgttgtgagccacctgtggttgctggaaattgaactctgggtgtctggaagagcagacagtgctcttgaccactgagccatctttccagtccccaatcaatctacttgaagctgccatcataggtggttattagcatctgatgttcagttctgggaactgaacccaggccctctgcaaaagcattacatgctcttcctgctgagtcttttctccgaccccctcttctgcacgtttgactctatgtgagtatctacatcgaagtttgtgctgtcgacatagaactgtatctgtagatgagttcggactcttggtgactttgggtgaatgtagtgcttactagtccccactgtgtgttaggaacatcagttaatcctatttagtaaatttggtgaataagccataaaaacaagacatggagcagtacttccccaagacctctatctcatttccccggtcaggctccttcctgccttgtgttttgccctgaattctcgtgtcttttctaatttacagctgtaagattaaataaatgcttcccccaccccaagtcacttctggtcatgaggttttatcacagcaatagaaccctaaccaggacaactgtctaaaacatacccagtagcaggcaggagaagtcccctgtgagctgctggtcaagggaatctgagagactccaaaaacaacatgcgctcttgcttttccgtttttctgtctcccagagagttaagggaagtccttagtgatggagacaccttgcgctttggacatgggactcaaaagactcatgctggatctgacctgaaggcttcctcactgacgactggccttcattgtacagaaaggtgctatgcaaagtgccgagggaggcgtgcaaccaatggttctacaaagctctccctgctatgaaccagagcaatgaccagcatggcgagatatgcctgggggcgggagggtaggggtactcattcttggcagtaaccaacagctgcctaattggatgtaagcctgctcaatgatggcgggtgggggggagtccactctgtcagtgtttttcccatgtcatagaagtttgtcatgcatgtgccatagtaggagatgatctcacagctccttctactttctcataccggacagtttgcctcatgtccagaaagaactgaaggcctgactaatggatgttcagggcatgttccttagcctgagaggtagccaatgtgcaggttaaaaaaatcagtttttttttttttttttttttttttgccatgaatatgatagaccttaagcagccagaagaaactacctgccttctctgaagtccactgaaggtaggattggagggcccagtgccacctttctacacgacaggctttggtgctagacaaaccttattctaagatattgagtctggcatacagtgctttaactccagacctcctgacactgaagtccctaatacacataccctgggcatggcagggttgggcaggcagcagttcaatgattaaatgtctctaggacagtgcccagtgtgtcctggacatccactgacaccctcattcagcattatcaatactgtgaatcccatgtggatccaggcaggtgactgccttgcaaataggaccaggcctaacccatctggatctgagcagagtctagagaatgaccagagtggaagcccaggagagggtgatgactggggggcacacaccattgttttgaacattgtcacttatgctgacttgtgccctcagtttccatcacctttctgagagacaaagccacagttctgtaactgatgtggccaaggctaaaggcatggatttgtacctcgatgtcataggacccaacagcggagacccctgagcttcctctgttgcttgagaatatgtgaaggtgctaggactgatcctccagctgcagtgggactcctggtaccacccaacccatgaccctttggaagtgtggtctataaagccttcctttctactctgttctcgctaggcagcgagagccagttcattcactgtgggcatgtctctttcctagttagctacaatttgtgcagcttggagcactttgacacaggagaccccccccccttcccatctcaaacacagaacacaaacaaacaaaaggtcaaataaaaataaaaagaacccaggttgaagagatggctcagtggttaagagcattgactactcttttggaggtcctgagttcaattcccagcaagcacatggtggctcacagccatctgtaatgagatcttatgcttttttctggtgtgtctgaagacagcgactgtgtactcatatacataaaataaataaaccgaaagaaagaaagaaagaaagaaagaaagaaaggaaggaaggaaggaagaaagaaagaaagaaagaaagaaagaaagaaagaaagaaagaaagaaagaaagaaagaaagaaagaaagaaagagaaagagccactctggagccaggtatggtaggtaaaccaaggtgggtggggattgggggatggtttggagaaaggggtggaaacagaaggatcaggagttcaaaaccaacctattttttagtatggatttgagagaccagcctgggttacatgagaacatgaaatttatctcaaaggcaaaaacacaataaaacaatacaaacaagggatggctgcctcccatatgagatctgagacaccagcttatctgtactttcagtctcttggaaccttgtttaggagtactggacgcggggagtatatttctctcgtgcccctctgcgtccaggacaacaatgcagccctggggaggtttactcaaacattgtgagctttaggaagggcatgggtggagactatagaaccctgtatccccaattcagcgatatttggagaccagtgccgaagtcacgtgacccagaaacttgtccaaggaggcatgcatctctgggctgaagtctccaggatagtgcctggcgagagtcaccagcagacagtggctgaagaactgaagaaagagaaccgccacgccttgccttaatttctcccctacaccaagccttgaagggacccacatctccagcaacccggggtgagctcaatacaggactcacctggaagttagcagggtccacacagagcttgtgcgcatgtagatcactgagagcagacagagaagcaggcaggtcgtccaggtgctgggtagcgagagtcagtgcatcggccaccttttgggcatgggctttaacctggctagagcctggcctcaggtccaagtgtgggaagtaggttttggtggaggggaaagccacgaaggtcctgtaggaaaacagggttgggctcagccggacccggaggtacagagagccggtcttcgccccgcagtccgttggaagatgagcccgagggcgtacctctccaaagcctcggtcgcgtagattccgacattgctgcccatcttcttccagagcgcaaggaccagccactgatcatcctgggaccgagccatcttcagtgaactgagccttgcgctctgcccgctggctgagctcaaagacgtcctgaaacacaagaggccgccagggggcgctgcatcgttccaggatgcctaggtgttcacagattctggttcagctttgagccctctgtttccctgggctccccctccacgccttacattttaaagtgtttactgcatgcacattggcatataatatgtactatcgattacaatggattttagtgttcatttggcactgtcggctcgtcctgcctcccgagtcgttcggaaacttcacaggttttcctttcttattcattattgaaaaggactgagtgtcaggagcccgtacccatacttggtctttttttttttttttctcctggaacacgtctcctttcgttaaatatcaacatagttaaatctgcatttaaaggggatggacagatggctcagcagttaagagcactaactgctctcccagagtacctggctttggttcacagcacaaacatgcctgctcacatttgcctgtaaattcaggtcaggtagatccaagccctcttctgtcttccacagtcatacaagagatgcacagatatccatgcagcccaaacacccacacgtgtgaaataaaatgaaagagatttaaatctacattaaacacccctttcaatctgggtcttgtggcacaggtacaggttaatcttagcacttggaggcagatgtaaaaggatgtctgtgagttcaggactatcctggcctacatatggaactccaggccagcagtgctacataatgagaccctgactctgcctaaaccacttcagataaaaatcccctttaatacattccaactgtgggggctggagagatggctcagtggttaagaagatgggactgctcatccagaggtcctgggttcaattaccaggaattacatgtggctcaaaactatctgatgccctcttctggtttgtctgaaaactgctacagtgtacttacatagttaaaatgaataaataattcttcaaataaataaaatctaagtctgtttcaaaaatatattcttatcagagctgtgagaattaagtagatgaaaaatattatatgcctggatcatagggcaaattcctttggggacaatgacctttagagtgcctattatatatctcaataatgacagcaatgatgacaccctcggtgaatacatcatcattacatgaaagattctgttcttatttgggtttttgtgtgactatggtcaagttccaatgttctggaactagaggcatgtggctcaaagtcctgtgcattttagacatgtttgatgggtatacgtcagtgatgtcatattcttccacaatgttgtgcagtcttcactataaccatttccagaacttttactaactaaaatagtacctctagcccacttgcccgtaaccatccaacacccaccaaaaggctctgtcaaccaggaggctacttactgtccctatagattcccccagttttgatattttacaaacatgaagccatgcactgtgtgacctttgtcctgttggtttcttccacttgacatttttttaaggtttatatccattgtatgagaaatttactctttgctgtcaatagttcaaaaatattatttgtgggtgtatagatgtccctcggtcagtagagtttttaatatgtatgtatgtatgcatatacatatacaactctgagatcaattcccaagcactgcataaactgggcatgaaggcacatatctgaaatatcagaactcaggggtagaaacaagaggatcaagagtttcagggcagccgggcagtggtggtgcatgcctttaatcctagcacttgggaggcagaggcaggcagatttctgagttcgaggccagcctgggcgacagagtgagttccaggatacccagggctacacagagaaaccctgtctcggaaaaaaaaaaaaaaaaaaaaaagagtttcagggcatccatccttatctatataacgtttttgaggccagactgtgctacatgaaattctatctgaaagaaagaaagaaagaaagaaagaaagaaagaaagaaagaaagaaagaaagaaagaaagaaagaaaggaaggaaggaaggaaggaaggaaggaagagggcaagagcaggcatttttatatgagctacctgttgcctacccatatgctcatatgatgtctatttttcactgtttttctaatagatcccacactgaagtaccagcggtattaaggagctcattccctcagaggacctgtgataaggaccctccaaagacgatctttggcttctttggctcaaggagaagacacatggctgtcagtggagggcttgggagggactgctgcccagactcagaagacatatgtgtgtgtgtaggcatccaattatgctttttgctctgaaccttgtctttactgccccatggctaaatgagctagaggcatccccacactaaacatgacacctttgcagacgcagagaaccaggcatgcag

SEQ ID NO: 45 - DNA, 28856 bp, Homo sapiens
aagggcccagggaatatccaccagaaggaggagatgcagggagagaggagggaggcaggccaagcaggaaggggtggtcagtagcttcagatgggctacaggtaaggcaagcttaggaccagaatgtttcattggatttagccacaagaggtcatttggagtgggtcaaagctattctgggtagaagccaaacagtttccaaagcaaaacaggcggcaacactagcattcagagagatccagggaccaagaatcttaaagaaaggtttaaaatggtcaaaataaacttgcatttaattaacattttcatgagtactacagtaatacataatcaatgcagaaaacctggaaaacaaagaaaactacaaagaggaaaagaagtatttctcattctaccttccagacatacctacatttcttcccgtgtatgtgtatttatatcaggtgtaacaagcatagttcatcttgtcgtgtgacaagcatagtctgaatttgcccaatatttcaaaacctattatttaaagaaacttgaagaaaacctggaagaatattttcattgtatcaaagtagactaaataggccattttaagtatgtcacaaaatctagaagcataaaagaaaggatatatagtctgcttcatataaatcaaaactttctgcatggcaaaaacactataaattaagcagaaagacgaatgataaattttaaaagacatgtgaaaaacaaacgtttgctccttggaatatatcaagaagggctttgaatcaatggaaaaggatcaataactgacagaaagatagacaacggatatgaacatagaattcacggaaaacaaaataaaaatggttcttgaatacctgaccaggtgctcaatcctacttatacaagagagatgcaaattaaaactacgctgatataagttcttccctctgcaatctggcaaagatcaagaaaactgacagtatcatgtgctgacaaacatatgaggaacagctgttcccatacatcactggagggagtattaaatttgtacaacctctacctgtctctgtctcaaaactgcccatatcctttgagtcagcaattcaatttctaggaaactatcacactaatacactcacatgtatgaaatcgcacatggacaagattattcattgccgctttagctgtaataacaaaagattggaaacaacctaaaattcccttaatgggggactggttaaatacatggaattcgaaggctaaaaaggaagaagcaattctgcatctcctgataagaaatgattgctaaaacccattcaataaagaaagcaaaatgtagaacagtgtaactgatgtgccatcacttatgtagaagaataaaaataaatcctaggaaatatgaatattttgctaatacatgcatgaagtatttctagaaggaatcacaagaacccagtagttacccctaatggctcacacatggtggaagtgtaaattttttttgtaattttgttactaagtactctttgttatcttttgaattttgtgccatgggtatgtgttacctatgtaaaaactagaaacttaacatataacattttaaaacaatggctgcgtgtggtggctcatgcctgtaattcctgtgctttaggaggccaggagttcacaatcagtctgggcaatatagtgagaccttgtctctacaaaaaacaattctaaaacatttcaaaaccaaatgaaatctatgagccactttatttgccttttttttttttggtggtcattttgggttttgctttttttttttttcagctgcctttccccttcttgctttgtctatgttgatgcttttctctctttttcccttctcctctctgtttcccttgccccacctctgtctaatacatcaacaactaaacaacaacaattatcatctaccaacaatttagcatataccaataactgtccttaatggataggatttcatttaattcccacaaccacccccagatggttaagtattatttgccacagtttacaaatgaggaaacgcaggcacagggaattgaagtgccttgcccaaacccacacaagctgtaaatgatggagctgggatttaaaccaagtcggcctctgcaatccatgttttctctagtaaaccatactgcctgtgatatggaataagtacatgtattttttttcttaacttttgcgtaaagtatgaccatctttgtttctaatttgtaaatcaaataagcttaatattttatatggcttttagaaagcacatatacaaagaaaattttataaattaaactgttctttacttctaaatctttgacgattatttccaagacataaattccaaggagatcccagctttcattcgtttaccatcctgtgcaccaaccacgtactcaaattcatgctattccttcgcacaagaaagatagagccctcaagaaactctcaatcaactggggagaaaataataacagtattaatagctcatgtttactgggactctaccatgtgccaggcagatgctaagcactttacataggttctgataactctgtgacataaggtgcaactgctacctccatttttaaaatgagaacaattaagcccagatgttaacttcccagcggacctcagcttagaaagtacagaacaaggatttgaacctaggcagtttggctccagagcctgtgccatcacaacactgcccggaaacagattagtacagtacatgcccctgcgggagagcccagaggagaacctgcactattcctggaaattgatcagcagaggcttctgggaggatcgaggcatgatttgagtcttgacagaagttcagaacacagagacgtcacggcattctaccctgcactgaaactgttctaaaaagactggcatgcttcggagagaaaaaaaaaaatgtagcatagagtctcctgtgacctgcctgggagctgtgccatgcaatggaaccaaatttccttcagggagttttacattttactcaatattctgaagtttagctatcacacaattaagtatcaaccaggttcctgtcatcagtgggtactgttggaagaggacagggaattggatttaacaacactgtttgttcttctaatgcaacatcgtagaaatatgtaacagaactgtaatggagatgaatcacaagaaggacgcagcacaagatgctatgccaagaataatattaggagaagtgacgttctgtcattctgttacagttaagagtaaacttatgatccaagaagcagcaatcctttagagaccctgagaactcttcagggctctcctcgtccttttcactcagggccccaaagccagcctcttcattcatcagctctggatgggacagacagtgacaaagcagaaatccctaggcccctgggctgctgctgtgcagcagcaaactccctcactgtgactaactttctgcttctaacttatcccatggctcagaaaagctgggctcagcctctgccttgatccatcaagccatgatccagcacgtggctggggaaaatctgagcgcatataattctgtaggacaaggtgtgtcctgcgcacatcctaactctccctcattcaggtggcagcctgtgcctatctgtttataaaagtggcagccttcattctgaggtatagaagcagcatactttgaccagaacaatctctttccttaaaaagctttgtgatcaattgcctttgaaatgagagaagatcaaataatccttaatgcctttgatacatccttttcttacactccccaaatagagctcatacaatataactaatctctggaatggattgattttgccttcaaaatatccttttatttccttggacccacttatggtctggaagatatttaacaactagctaaggaacagagggaagggagggctctgattgtagcatttgccaatttccatggtgtaatgtttccacactaatttcaagctaccatcaggagtcacttaatgtagagttgggaagagatcagtacagttggctctcttgaaccggccagctcctgtgcaaccctgcctgggctcctccatctggtgtcatgctgagatgtttgcaacagcctctgagcccacctcccagactacaatcccctggggtcttcttcctgctcactcagatgaaatactttcatcatgtcactgttcttctgacaaccctacccccaatttaccaccccattttacctcttctcccaaagaccaatgaacttttttcatgattctgggttcctgcatcatctcaggtaaataaatcatttaacctctccgaacttcagtttcttatccataaagtgagaataaaatagtcacctccatagagtgaagtttaaatgaattaatgtgtgtaaagcctctagtccagcacctggcatccaataaatacctgattaatcctacatgtcaattactcaaagtaccttagaaggaaaacaatggtgtcgttatagaattcaaaggccacgaatcctcaaaggacttcactcagtacctcaaaactattccacattggtgcttactattatatttttgatgagttctagagagagaagaaatgctaaaaaacccaacagtagctcattttagcatctcagaatcctcaagcaagaccatggccaaacactcaaactccttccctgaccgttatcaagagaaactctctgctttgtggtgggtcttgcttctgcacccacaggaaatgcagtttctcttgcacaagtaacacaatcacaataagtgagaggtcacctgagggagatacaaccagacctggagatggaaaggagagaaatggtacaagactacaaagtccttatcaaggtttacattttttttgccttgcaaaacagacctttataagaaatgtcaatgtattagaggtaacgggccacacaagatgagaaaagatgatgatgccatcattcatgacaattctccgtaggtcctgccaccaaggaagagcaatgagctactgatgcccattgtggggtccaacaaaagcatggttatgtcccagaaccagctgaaaagcaaagttcagctgaactgcaaactcattttcatgatgccaaacaatttgcacagcttgatttagggattacactgctccatgaacaactggtaagttaaccctccaggaaactcagtgattgttttaaatgcatctcatccccattaagatatgaactctttccccgcgccttaacaagtgaattgtgtgcatatgcaggagtcatctgtaaacctcacttgatgtttcccctctgaactctgattggtatacctacagctattatttacttcacctctactcagagttatccagaatgttacgcatacaaaggagtataaatagggaaagcaggttatcaaacgccgtggatggcattttcccattacacctagatacatatgaaaaaatgtacaaacgactagaatgattacaccatagtgataacaatgattactactgggtactaagataatgtattttataattttttccttttgtttatctctcttttctgttttctacattgaaaatgtattacttgtttttaaattaaaaacatttaatttgaatacctcatatgagtgtggccttacaggcctgggtacccaggaagcctggtctggcctgtataataattaagaaataattaattgtataataattgtgcttgtataataattaagaaatctgctacctcctttcaggtagcagcccttaccagggctctagaatctcctgaatcagtttagtctccctgaagccactaagatctgggcatgtcaaaatgggtggcaccctgcccagtcaaagcacttccactaacaggtccttgggtgggaactagaagacagcatcaggcttttgggctttcaaaaagtatttcttaatgtagagactcctattcctgtagtcccattaacagtagactcttgattaataagcatggctaatgaaaatccacagaatcacagaaccacagaatcctggagctaggagggaattcagcaaacccctaaggtgggagagtactttgccccaaatcctcagttcatcgtcatctgaacactttcatctgccaacagctacactcccaagacacaagaagccgaggatttggcaatgcagtaaaaagacaagcctaattcagggaaaccctacattcagccaaaattttttgctggcagtataaaacccccacttccttctgaatcctgcagtctaaatcaagccaagaagggcaacagggcttttacaagcctggccaaccgattacccacacaatgtcagacagaaacagcccaggactcaaatttccctctgacacctgacctgcccctgactacatacctggtgtcttcagtagtttcactgggcccatggtggacaaacttaacacagagaaagaatgtgcatgacagcctctctattggttgtcctagagagataggaggatctgaggcacttggtggcaactgcttaggcagcaagcctccaaacaagcctttagcaataggaagccatttccacacatccagatcacttgccaagctgatgggtgccttccctcctgtccccacctctccccgacccccgtctcacccacagaaaagtagcacatagaaaatatggcttccagggtgagagatatagggaatcccacagtgcccttgggggacacagtaatgtggctcagacatagaccactgtacagatccagcagcacaggaagggctgcaggcctgggagaaaagtgacagcagatggccggtccaggctttctgggtacccaggcctgtaaggccacactcatatgaggcaggcagcaccccttggaacaatatctatggtaggtctatagaccaagggctctgctctgtgccgcagacatccacacacatacataggtacacatgacatagaattcaatagcttgaagaaattgcctatgattcttcaacttgcttacctggatctgaattcttccataacattttaaatcaatccaggtgtacccatcttcagaaataatggaccccaatgtctcagaattacagagtcagagtcctcaacatgtccaaagcatttcgtggaaattattccaccatgaagactagaatggcctctcttcatggattcagcttgctaaggaggcttagttcagagggactaagacactctccttttagcaaataactaaccaaaagggcaaggaagggaggtaaaagacgtcataaccaggccagtagaatcccctggtctggccattacatgtgatgatttcaaatgggttcttagtaccttaattttgagggaaaagagtagaggaaaccagccaatgctttgcatgcttagtttctgctgatgacactgaactcagagaactgagatctttggagaaaccaaagatggctcaaatgactcgtgataataaatgaacgtattactgctcgctgacaaattgaagtttcctaattataaagcagaaccagtggccaccaccatagaaagcctaccccacagatggagaagaggcaaagcactgaaactcagtccgagggacctccccagccatgggggcagggccaaatggggcttcttcaggaccagcaaagccatttttctcatcagcaaactagcttcagagaagtttgcaatcagggcactctcttccaagcctagagacccagggaaaggggtacgggggtgtcccaaggcaaagagaatctacactttttgcccccggagaggctacttccctcccaagatgcctgggattttccacttcagcagggggaaggtaagtcacatagcaaaataatgagggcacagaacagatgacctccctatagagttttgaatgagaaacacagcagggcagatgtgccccttctctagtctaggaggagctaggtccagcccctgaacatcctccccctcagaaaagctgaggccagactaagaattcaccagaccaaggagctacaacaggacatcagagctgaggctgcaaagccaggactgagaccagaccaggcaggaaactgtcaagagctttggtcaccaggcctggctgccctccaacatcagctggctctttctaaattgacacaccacatgtccctaaaattctctcttcaagtaataccaccatcaaagcaggacatttcccagagccttagagcctggtgtctgctcagtgggactcaaccccagaagaagctgttaaatcacccactgtttcagtttacaaacttcttacgacttggcaacaagtgaaactacattctggcagcaactgcaagttccctagtacccaggacttcccgttttttcttgctgtactccctcctgttaaatcacagactcatccatctccaacccccagaatatagagaaagagcacaacactacatcttaactcctgagacgtggagaacacttctcctcctgagagcttaagtaccaaatggaagctacttttcccccttggtctcaaatgtattactagattctgaactggactccaccatcacgtaagaaagcagtcatgggcagtaattctgggagatccagataggacatgccagccccacactggtggcataggaagccaagttgctgcttcctccctgtgcactcccatttgtctggcctctcttgatctcagctggcgctcacttcacatcagctatgatgcaatccagcaactaaagtattagttaataaatgctgacagcacagccttttctggtcacgtattcatactaaaatacgggggagagttggggggagagggggatatatgggaaatctctgtaccttcctctccattttgctatgacctaaagctgccctttaaaaaatacaaggggctgggcacagtggttcacgcctgtaaacccagcactttgggaggccgaggcgcgtggatcacctgaggtcaggagttcaagacccgcctggccaacatggcaaaaccccgtttctactaaaaatacaaaaagtagctgggcgtggtcgcatgcatctgtagtcccagctactcaggaggctgaggcaagagaattgcttgaacctgggaggcggcggttgaagtgagccaagatcatgccattgccctccagcctgggcaacagagcaagactccttctcaagagaaaaaacaaaacaaaacaagaaaaaacaaagaatgagctctccacgcgaaaaatccattgagatgcaaaggaaggaagctatcattgtggaattgcacatgtcagttacattaacgtttttggagcaaggtagagctcatctctcccacaagcaaattccagcccaaagcattgatactaataaagtgccatgctgcgatgtgcagggggcagacagtgtctccaagctccctacacacatgccttcccacagtttgccctttcttgaccccagaagcatcaggccccttcaccctcgagggccactatcaggagtttgaattaatggcaatcaccatgcacagggaaggctgtggaattctgacataaaaacacttagtggagggcttggaaaaagtctagtaggagcaagacgcaagctggactaattatctaaaacaagagacctggtttggggatcttaatgttctcaaaaaagaaaattattattatttttcattttgcactttgtgccataaaacattttcaacaaaacatagaatctcatttcttttgagggaaaatgattgggagaccagctcattgctggcacagaggcctggttcattcataattccttcataggcaagacaccaggtgaaccgatatagccgagctggaagagctctccaaggcagagactctgagccaaggaatgttcaaagagctagcatgtattgtgggattactatgcgccaggaattttttacactgcatcacgttccatcttcacaacagccctagaaaggaagaactattattacccccgttttataggtgaataaacaagggcacaggtccttgatgtaacagccaggatcaaacagctgggaagacgagaaaacctttcccaggctaggataacagaggatttggttgaaaatacaggcaattaggtgctacctctgggaaaaggggccaggagaggaaggagacacttttccctgcatgccctgatgtcctatttgaacattttatcatgaacacgaacttcctatttaaaaaacactttttattgaaaagataaatctgtgtgttgtattgtgtcactcagttcaagtacttgaaatttattgaattgtattttctaaaaaatagatagttgagtaaaagcaagctcacattacatagacggatcacagtgcacggctgcggagctgggagcagtggcttcgtttcatgcaggaaagagaacttggttcaggagtgtctacgttgcttaagacaggagagcactaaaaatgaaaccatccagccatcctcccccattttcattttcacaccaaagaatcccaccgcggcagaggaccaccgtctctgtttagacaatcggtgaagaatggatgacctcactttccccaacaggcgggtcctgaaatgttatgcacgaaacaaaacttgagtaaatgcccaacagaggtcactgttttatcgatcttgaagagatctcttcttagcaaagcaaagaaaccgattgtgaaggtaacaccatgtttggtaaataagtgttttggtgttgtgcaagggtctggtttcagcctgaagccatctcagagctgtctgggtctctggagactggagggacaacctagtctagagcccatttgcatgagaccaaggatcctcctgcaagagacaccatcctgagggaagagggcttctgaaccagcttgacccaataagaaattcttgggtgccgacgcggaagcagattcagagcctagagccgtgcctgcgtccgtagtttccttctagcttcttttgatttcaaatcaagacttacagggagagggagcgataaacacaaactctgcaagatgccacaaggtcctcctttgacatccccaacaaagaggtgagtagtattctccccctttctgccctgaaccaagtgggcttcagtaatttcagggctccaggagacctggggcccatgcaggtgccccagtgaaacagtggtgaagagactcagtggcaatggggagagcactggcagcacaaggcaaacctctggcacagagagcaaagtcctcactgggaggattcccaaggggtcacttgggagagggcagggcagcagccaacctcctctaagtgggctgaagcaggtgaagaaagtggcagaagccacgcggtggcaaaaaggagtcacacactccacctggagacgccttgaagtaactgcacgaaatttgaggatggccaggcagttctacaacagccgctcacagggagagccagaacacagaagaactcagatgactggtagtattaccttcttcataatcccaggcttggggggctgcgatggagtcagaggaaactcagttcagaacatctttggtttttacaaatacaaattaactggaacgctaaattctagcctgttaatctggtcactgaaaaaaaattttttttttttcaaaaaacatagctttagcttattttttttctctttgtaaaacttcgtgcatgacttcagctttactctttgtcaagacatgccaaagtgctgagtcactaataaaagaaaaaaagaaagtaaaggaagagtggttctgcttcttagcgctagcctcaatgacgacctaagctgcacttttccccctagttgtgtcttgccatgctaaaggacgtcacattgcacaatcttaataaggtttccaatcagccccacccgctctggccccaccctcaccctccaacaaagatttatcaaatgtgggattttcccatgagtctcaatattagagtctcaacccccaataaatataggactggagatgtctgaggctcattctgccctcgagcccaccgggaacgaaagagaagctctatctcccctccaggagcccagctatgaactccttctccacaagtaagtgcaggaaatccttagccctggaactgccagcggcggtcgagccctgtgtgagggaggggtgtgtggcccagggagggctggcgggcggccagcagcagaggcaggctcccagctgtgctgtcagctcacccctgcgctcgctcccctccggcacaggcgccttcggtccagttgccttctccctggggctgctcctggtgttgcctgctgccttccctgccccagtacccccaggagaagattccaaagatgtagccgccccacacagacagccactcacctcttcagaacgaattgacaaacaaattcggtacatcctcgacggcatctcagccctgagaaaggaggtgggtaggcttggcgatggggttgaagggcccggtgcgcatgcgttccccttgcccctgcgtgtggccgggggctgcctgcattaggaggtctttgctgggttctagagcactgtagatttgaggccaacggggccgactagactgacttctgtatttatcctttgctggtgtcaggaagttcctttcctttctggaaaatgcagaatgggtctgaaatccatgcccacctttggcatgagctgagggttattgcttctcagggcttccttttccctttccaaaaaattaggtctgtgaagctcctttttgtcccccgggctttggaaggactagaaaagtgccacctgaaaggcatgttcagcttctcagagcagttgcagtactttttggttatgtaaactcaatggctaggattcctcaaagccattccagctaagattcatacctcagagcccaccaaagtggcaaatcataaataggttaaagcatctccccactttcaatgcaaggtattttggtcctgtttggtagaaagaaaagaacacaggaggggagattgggagcccacactcgaattctggttctgccaaaccagccttgtgatcttgggtaaattccctaccacctctggactccatcagtaaaattgggcgtggactaggtgatctcatagatccttcctgctggaacattctatggcttgaattatattctcctaattattgtcaaaattgctgttattaagtatctactgtgtgccaggcactttaaataaatattgtgtctaatcttcaaaacaaatttgcaaggaaggtttttggagataaggaaactgagactcaggattaagtaacacacctaaagtcacaggtgagcttggaactgaacccaagtgtgcccccactccactggaatttgcttgccaggatgccaatgagttgtagcttcatttttcttagagactttcctggctgtggttgaacaatgaaaaggccctctagtggtgtttgttttagggacacttaggtgataacaattctggtattctttcccagacatgtaacaagagtaacatgtgtgaaagcagcaaagaggcactggcagaaaacaacctgaaccttccaaagatggctgaaaaagatggatgcttccaatctggattcaatgaggtaccaacttgtcgcactcacttttcactattccttaggcaaaacttctccctcttgcatgcagtgcctgtatacatatagatccaggcagcaacaaaaagtgggtaaatgtaaagaatgttatgtaaatttcatgaggaggccaacttcaagcttttttaaaggcagtttattcttggacaggtatggccagagatggtgccactgtggtgagattttaacaactgtcaaatgtttaaaactcccacaggtttaattagttcatcctgggaaaggtactctcagggccttttccctctctggctgcccctggcagggtccaggtctgccctccctccctgcccagctcattctccacagtgagataacctgcactgtcttctgattattttataaaaggaggttccagcccagcattaacaagggcaagagtgcaggaagaacatcaagggggacaatcagagaaggatccccattgccacattctagcatctgttgggctttggataaaactaattacatggggcctctgattgtccagttatttaaaatggtgctgtccaatgtcccaaaacatgctgcctaagaggtacttgaagttctctagaggagcagagggaaaagatgtcgaactgtggcaattttaacttttcaaattgattctatctcctggcgataaccaattttcccaccatctttcctcttaggagacttgcctggtgaaaatcatcactggtcttttggagtttgaggtatacctagagtacctccagaacagatttgagagtagtgaggaacaagccagagctgtgcagatgagtacaaaagtcctgatccagttcctgcagaaaaaggtgggtgtgtcctcattccctcaacttggtgtgggggaagacaggctcaaagacagtgtcctggacaactcagggatgcaatgccacttccaaaagagaaggctacacgtaaacaaaagagtctgagaaatagtttctgattgttattgttaaatctttttttgtttgtttggttggttggctctcttctgcaaaggacatcaataactgtattttaaactatatattaactgaggtggattttaacatcaatttttaatagtgcaagagatttaaaaccaaaggcgggggggcgggcagaaaaaagtgcatccaactccagccagtgatccacagaaacaaagaccaaggagcacaaaatgattttaagattttagtcattgccaagtgacattcttctcactgtggttgtttcaattctttttcctaccttttaccagagagttagttcagagaaatggtcagagactcaagggtggaaagaggtaccaaaggctttggccaccagtagctggctattcagacagcagggagtagacttgctggctagcatgtggaggagccaaagctcaataagaaggggcctagaatgaaacccttggtgctgatcctgcctctgccatttctacttaagccagggtttctcatatgttaacatgcatgggaattccctgggcatcttcttgtggtgtggagtctgacttagcaagcctcgggtgggtttgagggtcaaatttctaccaggcttatatccctggtgatgctgcagaattccaggaccacacttggaggtttaaggccttccacaagttacttatcccatatggtgggtctatggaaaggtgtttcccagtcctctttacaccaccggatcagtggtctttcaacagatcctaaagggatggtgagagggaaactggagaaaagtatcagatttagaggccactgaagaacccatattaaaatgcctttaagtatgggctcttcattcatatactaaatatgaactatgtgccaggcattatttcatatgacagaatacaaacaaataagatagtgatgctggtcaggcttggtggctcatgcctgtattccctaaactttgggagcctaaggtgagaactccttgaactcctaaggccaggagttcaagaccagcctggataacatagcaagaccccatctctacaaaaaaccaaaaccaaacaaacaaaaatgatagtggtgcttccctcaggatgcttgtggtctaatgggagacagaacagcaaagggatgattagaagttggttgctgtgagccaggcacagtgctgatataatcccagcgctatgggaggctgaggtgggtggatcatttgaggccaggagtttaagaccagcctggtcaacatggtaaaaccccatctctacttaaaaatacaaaaaagttagccaggcatggtggcatacacctgtaacccagctactcaggaggctgaggcacatgaatcacttgaacccaggaggcagaggttgctgtgcaccactgcactccagcctgggtgacagaacgagaccttgactcaaaaaaaaaaaaaagaagtttgttgctatggaagggtcctactcagagcaggcaccccagttaatctcattcaccccacatttcacatttgaacatcatcccatagcccagagcatccctccactgcaaaggatttattcaacatttaaacaatcctttttactttcattttccttcaggcaaagaatctagatgcaataaccacccctgacccaaccacaaatgccagcctgctgacgaagctgcaggcacagaaccagtggctgcaggacatgacaactcatctcattctgcgcagctttaaggagttcctgcagtccagcctgagggctcttcggcaaatgtagcatgggcacctcagattgttgttgttaatgggcattccttcttctggtcagaaacctgtccactgggcacagaacttatgttgttctctatggagaactaaaagtatgagcgttaggacactattttaattatttttaatttattaatatttaaatatgtgaagctgagttaatttatgtaagtcatatttatatttttaagaagtaccacttgaaacattttatgtattagttttgaaataataatggaaagtggctatgcagtttgaatatcctttgtttcagagccagatcatttcttggaaagtgtaggcttacctcaaataaatggctaacttatacatatttttaaagaaatatttatattgtatttatataatgtataaatggtttttataccaataaatggcattttaaaaaattcagcaactttgagtgtgtcacgtgaagcttaatataaacaagtttcttgtcactgccaccaccacgaccaaaaaaagctaatcaatcactatatataatacatatatatactatatataataaatatatatactatatataatacatatatacactatatataatacatatatactatatatacacatatatactatatatacacatatatattatgaatgtatatatatagtatatatagtatatatactatgtatgtatatatatagtatatatagtatatatactatgtatgtgtatatatagtatatatagtatatatagtatatatactatgtatgtatatatatagtatatatagtatatatactgtgtatgtatatatatagtatatatatactatatatgcatacatagtatatatgcatatatactatatatactatatatttatatatactatatactatatatactatatactgtatatatactatatatgtatgtatacgatatatatatatactatatatgtacacacacacatatatatatacatataagcacctactacatgccaggcatcattaaatgtgttgcatccatcacgtcatttaaccccagcacttgcacactcctttctggttgtggaagactaagtaatttatctaagtcacccagctggaaggtcaggcagggacccagatttgaaatccaagtctacctacctacaggtcccctactcttaacctgtaggtcccactgcctacccaggaactgagggatgatgtagaaaatcccaaaacatgttaatatagggaatacctataaacatgcaatcaaagtctttgggactatacaaccactgtataaagcataacaatgtacaagcttccaaacaataactagaagttctgcctccctcttctgggttcctaaagcactgcacctatctacctgtcaaagcatctaccacattgtaccacaccttaaaatcaatggtttttttcttctcagccagcatgtggatgcctcaataaagcagactcctttcatgacctaaaactaatttcaggggggaaaaaaagacgagctgggcgcagtggctcacgcctataatcccagcactttgggaggctgaggcgggaggatcacttgaggtcagaagaccagcctggccaacatggcaaaaccccgtctctactaaaaatacaaaaattagctgggcgtggtggcgcacctataatcccagctactcaggaagctgagacatgataatcgcttgagcctgggaggtagagcctggggctgcactccatcctgggcaacagagggagattctgtctcaaaaaataataataataatataaataaataaataatttttttaaaaaaagactctttcctatattaatctttgcatcctgtgcccatggccccaaacctgaccaatgaaggccccagtaaatattttttgaacaaaagaaaatatagatgatcaaagataagaaagataagaagacacctcaattcttgtaggcatatagtggtaggggaaatcactaattctgtgtgtttatgtatcttcatcttcaggaaaaatagcaagaattagaaagaaacactcaaaggacttccagagaaggcaatgaatagccagtgcatgtacacctacctccatttcctttgccactggcaataatcttcatctgccctctcccctccccgacctaaagtggtagtgagagaggcaatctggacaacttaacatggcctcgtttatccatctcaacacgacactgggaatttggtgcagatttcccctttctaacccctgcaatataaaagttctgtctccttataaagcttttccccattctacccgctacagacttcttcctccaggggaggagttcttctgggtaagggaaagtccacagaggtcaaaaaccgagaggagctgagccagaaaagagccacatactctgatttctagaaaccacgcatcacaagtgggcttcccaaaactagggtcaagtcaaagaacaaagagaaattgcgatcaactgatgctttcattcttcaaacaaaaatgggttgagtttcatagataagtcagggaaagctcctgagaaagaggtgaaagggtagacatgatccctgccctcttgtgtagcacactatggaagggaaaatagacattaaataaagactataaatgtgataaggtttccaaaaagaaatgtgggctgtgctgagaacccatactagaggcacggataatctaagtgaaccctggtttggctgctcaccactcgaaagccagacatgagagacaaggttggtgggaggaaaagccagttcatcagaaagccagtaaaccaagaagatggtgagctagtattttaaagtaccatcttgaattttaaaatttatcacagtagtttttaaagagaaacttggtatgggagatacgtgggagtggtgcgtggtgtagggtctgtgtgtcttgttctgatggctatctcaggtaaccgcctgtccggaggtctgtttgggatcatcttaacttcagctagatgatggattcattgttcatgattccttctaaccaggaggattctgcaatgggggctccttgcctcgtttgtttaaagatcagcctctgggatttttaaagcaagagtataattagataagcatacattgccagaggggagtgtctagagagggaaggaatgaagaggtgagaggaaagaaaaggaagaaaaagaaagtgggtaagaggcagagcaagatggcagaatagaaagctccaccaatggaccccctggcaaggatacaaagttaacaactatctgcacagaaaaacaaacaaacaaaaaacaccttcataagaatcagaactcaggtgagcacacatagtacctggttttaacttcatatcactgaaacaggcactgaagaaattaaaaaacagtcctgaatcacaatgctacccctcccctatccacagcagcagtggtgtggtgcggagaatgtctctgggtgctgggagaaggagaacacatcaattgtggggcactgaactcagtactgtcctgttagaggagaaaggaaaaccagactaaacttagctgatgtccactcacagagggagcatttaaaccatccctagcccaagaggaattgtcaatccccagcagtccaaacttgagtagccgcaaaactctccactgagggccaaacttgaaaggcagtctaggccataaggactgcaactcttaggcaagtactagggctcaacaaggcccggagacctagtggactgaggggacatgtgacataccgagataccagctgaggcagccaagggagtattggcttcacccctctcctaatcctaggctgcacaagtcatagcttcaaaagagactttttctttctgcttgaggagagaagacagaagagtggggaggacttggccttacctcttggataccagctcagctacagcaggatagggcactagtcagagtcataaggcccgtattccagacccaagctccaagacaacatttctagacacatcctagactagaagggaacccactgccttgaatgaaaggacccagtcctggcagcattcatcacatgctaactgaaaagcccttgggccctgaataaccagtagcgatccccaggtactacatcgagggccttaggtgagcctctgagacttgctggcttcaggtgagattcagcacattaccacctatggtggctatggggcaaaactcctcctgcttgggaaaagcagagggaaaagtaaacggggctgtatcttgttgcaccttaggtaccaacaccaccacaagggggtagagcaccaggtgggatcttggggtccctgattccaagctttgactcatgagtggcatttctggacctgccctgtgccagagagaggcctattgccctgaagggtgagtctcaggccaggcagcattcaccacaagctgacttaaaagacctaaggccttaagggaacatccatggtggtctggtagcacttcttaaggccactggggagcagggtgggcagtagctacagggtgagggttctctgcttctgaaaaggggagggaagagtgggaaggactgcatcttgtgggttgagtgtctgctcagtcacaagacaatagactacaaggtagacttctaagttttttactctggtccctaactcccagatggcacttctggacctaccctggggacctcatcaccctgaaagaaaggacacaggcctggctggctttgccatctgctgattattgagccccagggccttcagcaaacataggcagtagccagagagtggttacagcaggcctcgggtaagacccagtgctgtgctggcttcaggtgtgacccagtgcagtcacagtggtggtggccacatgggtgcttgtgtcatttcacccccagctttaggtggctcagaacagaaagagagattctgtatgtatgtttgggagaaagtaaaagaggagaacaagaggctctgcctggtaatccagagaattctctcagatcctgtctaaggctatcaaggcagtacctctatgaatctgcaagaaccacagcattcctgggtgggaggtgccccctaaagaagaaacagcttagattacaacacccaaatcctttcaaatacctggaaatccttcccaagaaggatagctacaaataagcccagacaatgaagactacaataaatatctaactcttcaatgcccagacatcaaagaacatctactagcatcaacactatccaggaaaacgtgaccacaccagatgaactaaataagtcaccagaaaccaatcctagagaaacagagatatgtgacctttcagacagagaattcaaaatagctatttgaggaaagtcaaagaattcaagatacacagagaaggaattcagaattttgtcagacaaacttagcaaagagattgaaataattttgagaaatcaagcagaagttatggagctgaaaaatgcaattggcataatgaagaatgcatcagagtcctttaatagcagaattgatcaagcagaagaaagaattagtgaacttgaagacaagctatttgaaaatacatagtcagaggagacaaaagaaaaagaataaaaaactatgaagcacaactatgggatctagaaaacagcctcaaatgggtaagtttaagagttattggacttaaagaggaggtagagaaagagatggggtagaaagcttattcagagggaaaataacagagaacttctcaaacatagagaaagatattaatatccaagcacaagaagattatagaacaccaagcagatttaacccaaaaaaagcctacctcaaggcatttcataatccaactcccaaaggtaaagaataaagaaaggaccctaaaagcagcaagaaaaaacaagtaaatagcatacaatggcactccaagacatctagcagcagactattcagtggaaaccttacaggccaggagagagtggcatgacatatttaaagtgctggaaaaacaaaacaaaacaaaaacctttcaccctagaatagtatatccagcaaaaatatccttcaaacatatagaagaaatagactttttcagacaaacaaaagctgagggatttcataaataaccgatctgtcctacaagaaatgctaaatggagtactacagtcagaaagaaaaggacattaatgagcaataaataatcacctgaaggtataaaacttactggtaatagtaagtgcatagataaacacagaatgtgataacactgtaactgctatatgtaaaccactcttaaaaagttaaaaagctgggggacaaagttaagagtttttattagttttctttttgcttgtttgtttgtttatgcaaatagtgttgttgttaccacgttaaaataatggattataagatagtatttgcaagcctcatggtaacctcaaaccaaaaaacatacaattgatacccaaaaaataagaagcaagaaactaaatcatatcaccagagaaaattatctttactagaggcagacaggaatgaaagaaagaaggaagagaagaccacaaaacaaccagaaaacaaataacaaaatggcagtagtaagtccttacttatcaataataacgttgaatgtaaatgaactaaactcttcaatcttcagacacagactggctgaatggatgaaaaaaagccattgatccattgcctgcaagaaacacacttcatctataaagacacacatagactgaaaataaaggagtggaaaaagatattccatgccaatggaaacaaaaaaagcaagagttgttatatcagacaaaatagacttcaagacaaaaaccataagacgagacaaagaaggtcactattaatgataaaatgatatatttgacaaaaagatataacaattttaaatatatatgcacccaacactggagcacccagatatataaaggaaatattattagagctaaagagagagataggtcctaatacaataatagctggaaacatcaataccccactttcagcattgggcagatcttccagacagaaaatcaataaagaaacatcagatttaatctgcactattgaccaaatgtatctaacagatatttacagaacattttatccaagagctgcagaaaacacattttcctcagtacatggatcgttctcaaggatagaccatatgttaggtcagaaaacaagtcttaaaatattttttaaaaattgaaataatatcaagcatcttctctgaccacaatggaataaaactagaaagtaataactagaggaattttggaaactatacaaacacatagaaattaaacaatatgctcctgaatgaccagtgggtcaatgaagacattaagaagggaattgaaaaatttagtgataatggaaacacaacatacccaaacccatgggatacagcaaaagcagtactaagagtgaagtttatagctataagtgcctacatcacaaaagaggaaaaacttcaaataaacaatctaatgatgtatcttaaagaactaaaaaagcaagagcaaaccaaactcaaaatttatatcaaaacaaataaagatcagaacagaaataaatgaaattaaaattaaaaaaaagatcaatgaaacaaaaagttaaaaaaaaaaaagttaaacaaaattgacaaacctttaaccaaactaaggaaaaagagagatccaaataaataaaatcagaaataaaaaaggagacattacaactgatactgcagaaattcaaaggatcatttgtggctactataactaactgtaagccagtaaattgaaaaatctagaggaaatggacaaatactgagatacatacaacctaccaagactgaaccagtaataaattgaaaacctgaacagattagtaacaagtaatgagattgaagctgtaataaaaagtcacccagtaaagaaaagccaaagatctaatggcttcaccgctgaattctatgaaacatttagaaaagaactaataccaatcctactcatactattccaaaaaatacaggaggaaaaaatactttcaaattcattctacaaagcccgtattaccctgataccaaaaccaggcaaagacacatcaaaaaagaaaactacaggccaatatctctgatgaatgttgatgcaaaaatcctcaaaaaatactagcaaaaatactagcattctaattcaacaatacgttagaaaggtcattcctcatgaccaaatgggatttatccctgggatgcaaggatggatcaacatatgtagattaatcaacatgatacatcctatcaacagaatgaaggataaaaaccacaggatcatttcacttaatgctgaaaaagcatttgataaaattcaacattccttcgtgataaaaactcttaaaaaaatgaggacagaagaaacatacccaagcataataaaagccatatatgacagacccacagctaatatcatactgaatggggagaaacagaatgcatttcctctgagatctggaacatgacaaggatgcccactgccaccactgttatttagcatagttctgaaagtcctagctagagcaatcagacaaaagaaagttatgaagggcatccaagttatgaagggcattcctgaaaaggaagaagttagattatccttgtttgcagaagatatgatcttatctatggtaaaacttaaagactctacacacaaaaagctattagaactaataaacaaattcaataaagttgcaggatacaaaatcaacatacaaaaattagcagcatttctatattccaacagggaacaatgtgaaaaagaaatttaaaaaagtaatcccatttacgatagtcacatataaaattaaatacctagaaattaacttaaccaaagaagtgaaagatctctgtaatgaaaattataaaatactgatgaaagaaattgaagagaacaccaaaaaatggaaaaatattctatgttcatagactggaagaattagtattgttaaaatatccataatacccaaagcaatctacagattcaatgcaatccttatcaaaataccaatgacattcttcacagaagcagaatagaaaaaaaatcctaaaatttatatggaaccatgaaagacctagactagccaaagctatcctaagaaaaaagaacaaaactggaggaatcacattacctgactttaaattatactacagagctgtagtaaccaaaagaacatggtactggcataaaaacagacacatagaccaatggaacagaatagaaaactcagaaacaaacccacacacctatagtgaactcaattttgacaaaggtgccaagaacatacactgggggaaaagacagtctcttcagtaagtggtgtttggaaaactggacatccatatgcagaagaatggaactagacccctatctctcaccatataaaaaaaaatcaaatcaaaatggactaaagatttaaatctaagacctcaaactgtgaaactactacaagaaaacattggaggaaaactccaggatattggtctgggcaaaatttcttgagcaataccccaccagcacaggcaaccgaagcaaaaatggacaaatgggatcacgtcaagttaaaaagcttccgcgtggcaaaggatacaatcaacaaagtgaagagacaacccacagaatgggagaaaatatctgccaactacccatctgacaaggaattagtaataagaatatacaaggagctcaaacaaccctgtaggaaaaaaaaatctaataaatcgatcaaaatatgggcaaaagatttgaatagacatttctcaaaagaaggcatacaaatggcaaacaggtatatgaaaaggtgctcaacatcactgatcatcagagaaattgtctcaccccagtcaaaactgcttatatgcaaaagacagacaataacaaatgctggcgagaatgtagagaaaagggaactgttgtatgctgttggtgggaatgtaaattagtacaaccactatggagaacaaacagtttggaagttcctcaaacaactaaaagtagagctaccataggatccagcaatcctactgctgggtatatacccaaaagaaaggaaatcagtatatcgaagagatacctgcattcctatgtttgctgcagcactatccacaatagctaagatttggaagcaacctgagtgtccatcaacacatgaatggataaagaaaatgtgaaacatatacacaatggagtactatacaaccataaaaaaagaatgagatccagtcattttcagcaacatggatggaaatggagatcattgttaagtgaaataaaccaggcacaaaaaggcaaacatcacatgttcccatttatttgagggatctaaaaatgaaaacaattgaactcataaacatagagaatagaaggatggttatcgaaggctgggaagggtattgtggggatgggggcagaaaaggatggttaatgggtacaaaaaaatagaaagaatgaataagaattactatttggtagcacaacagggtgactatagtaataataacataattgtacattttaaaataacttaaaaagtgtaattggatcctttgcaactcaatggataaatgcttgaggggatggatacctcattctccatgatgtgctaatttcacattgcatgcctgtatcaaaacacctcatattccccagaaatatatacacctactaggaacccacaaaagttaaaaataataagtaaataaaagtgggtgattaaaatatatttttaaaactgaagtacctggttataaacacccctctgttaagatttatttatttatttagagacagagtttcattttgctgcccaggatggagtgcagtggcacaatctcggctcactgcaactctgcttcccaggttcaagaaattctcgtgcctcaccctcccaagtagctaggattacaggcatgcaccaccacacctggctaatttttgtgtttttagtagagacagggttttgccctgttggccaggctagttttcaactcctggcctcaagtgatccacccaccttggcctcccaacgtgctgggattacaggcgtgagccaccacccccaacctaagttttattttatttttatggaaaatgagtaatatatttattttggctactttttgctgaaaaggtgtgtagttgtgggggcatggaatggaacctggagttgaaccctgagtggaaagtatttgtgagtccttgggcttacagaagagattactggagcattatggtgagtgtgtaatagcaatatagttcacagtggaggaacaaacctatctctagaatcatggctaaaattatgagtaattttttttttatcaggagaagcctgatctaaatcatgaggaaagccgttgattttagggcattgtgggatgagacatagcattaattttcctgtgtatgtcttagacgctgaggatatgttttcggagttacccaggatgtgcatacggcatttattcttatagtgcatgtttttcactgtcaattgtatccagagcttctgtggggagatgacaagttagctaaatatacatatttaataggctacaggaggagctatgcatatttatgaaggtggtcctgacacaaggatattgaacaaatatgtatgtaacatatagtccatgtctattttgtgctggagacgtaatatttaaatgtattataattagatcatatacatcaaaaggtcttttcaagtcacaaagccatgcacatgtataatttctgtaaactggccagaactagaccatggttggtagtctttttatcaagagaaagttattgaaatcaatctcttgtctaattaaagttgtagctatggctggtggaacaggagctgagggtcagttagtctgcttatgtagagactagtgtttttttggctgctggtgaaaaagaaaaaccttgtggcaattagaatatagtgtacttttaaagtgtaggaatatgtgacttaatctttgcctggcatggtcttaggtcgtgtttgtaacttggtattttattgttataaagggtttgtcagtcttatgatctgtattttatttattttagaatttttaaatttatttttgagatggagtcttgctctattgcacaggctggagtgcagtggtgcaatcatggcttaccatatccttaatctcccatgctcaagcaatcctcccacctcagccttccgagcagctgggaccacaggtgctcaccaccacacctggctaattttttttttttttttttgagatggagtcttgctctgtcacccaggctggagtgcaatggtgtgctctcagctcgctgcaacctccacctccccggttcaagtgattctcctgcctcagcctcgtgagtag

SEQ ID NO: 46 - DNA, 28856 bp, Homo sapiens
ctactcacgaggctgaggcaggagaatcacttgaaccggggaggtggaggttgcagcgagctgagagcacaccattgcactccagcctgggtgacagagcaagactccatctcaaaaaaaaaaaaaaaaaattagccaggtgtggtggtgagcacctgtggtcccagctgctcggaaggctgaggtgggaggattgcttgagcatgggagattaaggatatggtaagccatgattgcaccactgcactccagcctgtgcaatagagcaagactccatctcaaaaataaatttaaaaattctaaaataaataaaatacagatcataagactgacaaaccctttataacaataaaataccaagttacaaacacgacctaagaccatgccaggcaaagattaagtcacatattcctacactttaaaagtacactatattctaattgccacaaggtttttctttttcaccagcagccaaaaaaacactagtctctacataagcagactaactgaccctcagctcctgttccaccagccatagctacaactttaattagacaagagattgatttcaataactttctcttgataaaaagactaccaaccatggtctagttctggccagtttacagaaattatacatgtgcatggctttgtgacttgaaaagaccttttgatgtatatgatctaattataatacatttaaatattacgtctccagcacaaaatagacatggactatatgttacatacatatttgttcaatatccttgtgtcaggaccaccttcataaatatgcatagctcctcctgtagcctattaaatatgtatatttagctaacttgtcatctccccacagaagctctggatacaattgacagtgaaaaacatgcactataagaataaatgccgtatgcacatcctgggtaactccgaaaacatatcctcagcgtctaagacatacacaggaaaattaatgctatgtctcatcccacaatgccctaaaatcaacggctttcctcatgatttagatcaggcttctcctgataaaaaaaaaattactcataattttagccatgattctagagataggtttgttcctccactgtgaactatattgctattacacactcaccataatgctccagtaatctcttctgtaagcccaaggactcacaaatactttccactcagggttcaactccaggttccattccatgcccccacaactacacaccttttcagcaaaaagtagccaaaataaatatattactcattttccataaaaataaaataaaacttaggttgggggtggtggctcacgcctgtaatcccagcacgttgggaggccaaggtgggtggatcacttgaggccaggagttgaaaactagcctggccaacagggcaaaaccctgtctctactaaaaacacaaaaattagccaggtgtggtggtgcatgcctgtaatcctagctacttgggagggtgaggcacgagaatttcttgaacctgggaagcagagttgcagtgagccgagattgtgccactgcactccatcctgggcagcaaaatgaaactctgtctctaaataaataaataaatcttaacagaggggtgtttataaccaggtacttcagttttaaaaatatattttaatcacccacttttatttacttattatttttaacttttgtgggttcctagtaggtgtatatatttctggggaatatgaggtgttttgatacaggcatgcaatgtgaaattagcacatcatggagaatgaggtatccatcccctcaagcatttatccattgagttgcaaaggatccaattacactttttaagttattttaaaatgtacaattatgttattattactatagtcaccctgttgtgctaccaaatagtaattcttattcattctttctatttttttgtacccattaaccatccttttctgcccccatccccacaatacccttcccagccttcgataaccatccttctattctctatgtttatgagttcaattgttttcatttttagatccctcaaataaatgggaacatgtgatgtttgcctttttgtgcctggtttatttcacttaacaatgatctccatttccatccatgttgctgaaaatgactggatctcattctttttttatggttgtatagtactccattgtgtatatgtttcacattttctttatccattcatgtgttgatggacactcaggttgcttccaaatcttagctattgtggatagtgctgcagcaaacataggaatgcaggtatctcttcgatatactgatttcctttcttttgggtatatacccagcagtaggattgctggatcctatggtagctctacttttagttgtttgaggaacttccaaactgtttgttctccatagtggttgtactaatttacattcccaccaacagcatacaacagttcccttttctctacattctcgccagcatttgttattgtctgtcttttgcatataagcagttttgactggggtgagacaatttctctgatgatcagtgatgttgagcaccttttcatatacctgtttgccatttgtatgccttcttttgagaaatgtctattcaaatcttttgcccatattttgatcgatttattagatttttttttcctacagggttgtttgagctccttgtatattcttattactaattccttgtcagatgggtagttggcagatattttctcccattctgtgggttgtctcttcactttgttgattgtatcctttgccacgcggaagctttttaacttgacgtgatcccatttgtccatttttgcttcggttgcctgtgctggtggggtattgctcaagaaattttgcccagaccaatatcctggagttttcctccaatgttttcttgtagtagtttcacagtttgaggtcttagatttaaatctttagtccattttgatttgatttttttttatatggtgagagataggggtctagttccattcttctgcatatggatgtccagttttccaaacaccacttactgaagagactgtcttttcccccagtgtatgttcttggcacctttgtcaaaattgagttcactataggtgtgtgggtttgtttctgagttttctattctgttccattggtctatgtgtctgtttttatgccagtaccatgttcttttggttactacagctctgtagtataatttaaagtcaggtaatgtgattcctccagttttgttcttttttcttaggatagctttggctagtctaggtctttcatggttccatataaattttaggattttttttctattctgcttctgtgaagaatgtcattggtattttgataaggattgcattgaatctgtagattgctttgggtattatggatattttaacaatactaattcttccagtctatgaacatagaatatttttccattttttggtgttctcttcaatttctttcatcagtattttataattttcattacagagatctttcacttctttggttaagttaatttctaggtatttaattttatatgtgactatcgtaaatgggattacttttttaaatttctttttcacattgttccctgttggaatatagaaatgctgctaatttttgtatgttgattttgtatcctgcaactttattgaatttgtttattagttctaatagctttttgtgtgtagagtctttaagttttaccatagataagatcatatcttctgcaaacaaggataatctaacttcttccttttcaggaatgcccttcataacttggatgcccttcataactttcttttgtctgattgctctagctaggactttcagaactatgctaaataacagtggtggcagtgggcatccttgtcatgttccagatctcagaggaaatgcattctgtttctccccattcagtatgatattagctgtgggtctgtcatatatggcttttattatgcttgggtatgtttcttctgtcctcatttttttaagagtttttatcacgaaggaatgttgaattttatcaaatgctttttcagcattaagtgaaatgatcctgtggtttttatccttcattctgttgataggatgtatcatgttgattaatctacatatgttgatccatccttgcatcccagggataaatcccatttggtcatgaggaatgacctttctaacgtattgttgaattagaatgctagtatttttgctagtattttttgaggatttttgcatcaacattcatcagagatattggcctgtagttttcttttttgatgtgtctttgcctggttttggtatcagggtaatacgggctttgtagaatgaatttgaaagtattttttcctcctgtattttttggaatagtatgagtaggattggtattagttcttttctaaatgtttcatagaattcagcggtgaagccattagatctttggcttttctttactgggtgactttttattacagcttcaatctcattacttgttactaatctgttcaggttttcaatttattactggttcagtcttggtaggttgtatgtatctcagtatttgtccatttcctctagatttttcaatttactggcttacagttagttatagtagccacaaatgatcctttgaatttctgcagtatcagttgtaatgtctccttttttatttctgattttatttatttggatctctctttttccttagtttggttaaaggtttgtcaattttgtttaacttttttttttttaactttttgtttcattgatcttttttttaattttaatttcatttatttctgttctgatctttatttgttttgatataaattttgagtttggtttgctcttgcttttttagttctttaagatacatcattagattgtttatttgaagtttttcctcttttgtgatgtaggcacttatagctataaacttcactcttagtactgcttttgctgtatcccatgggtttgggtatgttgtgtttccattatcactaaatttttcaattcccttcttaatgtcttcattgacccactggtcattcaggagcatattgtttaatttctatgtgtttgtatagtttccaaaattcctctagttattactttctagttttattccattgtggtcagagaagatgcttgatattatttcaatttttaaaaaatattttaagacttgttttctgacctaacatatggtctatccttgagaacgatccatgtactgaggaaaatgtgttttctgcagctcttggataaaatgttctgtaaatatctgttagatacatttggtcaatagtgcagattaaatctgatgtttctttattgattttctgtctggaagatctgcccaatgctgaaagtggggtattgatgtttccagctattattgtattaggacctatctctctctttagctctaataatatttcctttatatatctgggtgctccagtgttgggtgcatatatatttaaaattgttatatctttttgtcaaatatatcattttatcattaatagtgaccttctttgtctcgtcttatggtttttgtcttgaagtctattttgtctgatataacaactcttgctttttttgtttccattggcatggaatatctttttccactcctttattttcagtctatgtgtgtctttatagatgaagtgtgtttcttgcaggcaatggatcaatggctttttttcatccattcagccagtctgtgtctgaagattgaagagtttagttcatttacattcaacgttattattgataagtaaggacttactactgccattttgttatttgttttctggttgttttgtggtcttctcttccttctttctttcattcctgtctgcctctagtaaagataattttctctggtgatatgatttagtttcttgcttcttattttttgggtatcaattgtatgttttttggtttgaggttaccatgaggcttgcaaatactatcttataatccattattttaacgtggtaacaacaacactatttgcataaacaaacaaacaagcaaaaagaaaactaataaaaactcttaactttgtcccccagctttttaactttttaagagtggtttacatatagcagttacagtgttatcacattctgtgtttatctatgcacttactattaccagtaagttttataccttcaggtgattatttattgctcattaatgtccttttctttctgactgtagtactccatttagcatttcttgtaggacagatcggttatttatgaaatccctcagcttttgtttgtctgaaaaagtctatttcttctatatgtttgaaggatatttttgctggatatactattctagggtgaaaggtttttgttttgttttgtttttccagcactttaaatatgtcatgccactctctcctggcctgtaaggtttccactgaatagtctgctgctagatgtcttggagtgccattgtatgctatttacttgttttttcttgctgcttttagggtcctttctttattctttacctttgggagttggattatgaaatgccttgaggtaggctttttttgggttaaatctgcttggtgttctataatcttcttgtgcttggatattaatatctttctctatgtttgagaagttctctgttattttccctctgaataagctttctaccccatctctttctctacctcctctttaagtccaataactcttaaacttacccatttgaggctgttttctagatcccatagttgtgcttcatagttttttattctttttcttttgtctcctctgactatgtattttcaaatagcttgtcttcaagttcactaattctttcttctgcttgatcaattctgctattaaaggactctgatgcattcttcattatgccaattgcatttttcagctccataacttctgcttgatttctcaaaattatttcaatctctttgctaagtttgtctgacaaaattctgaattccttctctgtgtatcttgaattctttgactttcctcaaatagctattttgaattctctgtctgaaaggtcacatatctctgtttctctaggattggtttctggtgacttatttagttcatctggtgtggtcacgttttcctggatagtgttgatgctagtagatgttctttgatgtctgggcattgaagagttagatatttattgtagtcttcattgtctgggcttatttgtagctatccttcttgggaaggatttccaggtatttgaaaggatttgggtgttgtaatctaagctgtttcttctttagggggcacctcccacccaggaatgctgtggttcttgcagattcatagaggtactgccttgatagccttagacaggatctgagagaattctctggattaccaggcagagcctcttgttctcctcttttactttctcccaaacatacatacagaatctctctttctgttctgagccacctaaagctgggggtgaaatgacacaagcacccatgtggccaccaccactgtgactgcactgggtcacacctgaagccagcacagcactgggtcttacccgaggcctgctgtaaccactctctggctactgcctatgtttgctgaaggccctggggctcaataatcagcagatggcaaagccagccaggcctgtgtcctttctttcagggtgatgaggtccccagggtaggtccagaagtgccatctgggagttagggaccagagtaaaaaacttagaagtctaccttgtagtctattgtcttgtgactgagcagacactcaacccacaagatgcagtccttcccactcttccctccccttttcagaagcagagaaccctcaccctgtagctactgcccaccctgctccccagtggccttaagaagtgctaccagaccaccatggatgttcccttaaggccttaggtcttttaagtcagcttgtggtgaatgctgcctggcctgagactcacccttcagggcaataggcctctctctggcacagggcaggtccagaaatgccactcatgagtcaaagcttggaatcagggaccccaagatcccacctggtgctctacccccttgtggtggtgttggtacctaaggtgcaacaagatacagccccgtttacttttccctctgcttttcccaagcaggaggagttttgccccatagccaccataggtggtaatgtgctgaatctcacctgaagccagcaagtctcagaggctcacctaaggccctcgatgtagtacctggggatcgctactggttattcagggcccaagggcttttcagttagcatgtgatgaatgctgccaggactgggtcctttcattcaaggcagtgggttcccttctagtctaggatgtgtctagaaatgttgtcttggagcttgggtctggaatacgggccttatgactctgactagtgccctatcctgctgtagctgagctggtatccaagaggtaaggccaagtcctccccactcttctgtcttctctcctcaagcagaaagaaaaagtctcttttgaagctatgacttgtgcagcctaggattaggagaggggtgaagccaatactcccttggctgcctcagctggtatctcggtatgtcacatgtcccctcagtccactaggtctccgggccttgttgagccctagtacttgcctaagagttgcagtccttatggcctagactgcctttcaagtttggccctcagtggagagttttgcggctactcaagtttggactgctggggattgacaattcctcttgggctagggatggtttaaatgctccctctgtgagtggacatcagctaagtttagtctggttttcctttctcctctaacaggacagtactgagttcagtgccccacaattgatgtgttctccttctcccagcacccagagacattctccgcaccacaccactgctgctgtggataggggaggggtagcattgtgattcaggactgttttttaatttcttcagtgcctgtttcagtgatatgaagttaaaaccaggtactatgtgtgctcacctgagttctgattcttatgaaggtgttttttgtttgtttgtttttctgtgcagatagttgttaactttgtatccttgccagggggtccattggtggagctttctattctgccatcttgctctgcctcttacccactttctttttcttccttttctttcctctcacctcttcattccttccctctctagacactcccctctggcaatgtatgcttatctaattatactcttgctttaaaaatcccagaggctgatctttaaacaaacgaggcaaggagcccccattgcagaatcctcctggttagaaggaatcatgaacaatgaatccatcatctagctgaagttaagatgatcccaaacagacctccggacaggcggttacctgagatagccatcagaacaagacacacagaccctacaccacgcaccactcccacgtatctcccataccaagtttctctttaaaaactactgtgataaattttaaaattcaagatggtactttaaaatactagctcaccatcttcttggtttactggctttctgatgaactggcttttcctcccaccaaccttgtctctcatgtctggctttcgagtggtgagcagccaaaccagggttcacttagattatccgtgcctctagtatgggttctcagcacagcccacatttctttttggaaaccttatcacatttatagtctttatttaatgtctattttcccttccatagtgtgctacacaagagggcagggatcatgtctaccctttcacctctttctcaggagctttccctgacttatctatgaaactcaacccatttttgtttgaagaatgaaagcatcagttgatcgcaatttctctttgttctttgacttgaccctagttttgggaagcccacttgtgatgcgtggtttctagaaatcagagtatgtggctcttttctggctcagctcctctcggtttttgacctctgtggactttcccttacccagaagaactcctcccctggaggaagaagtctgtagcgggtagaatggggaaaagctttataaggagacagaacttttatattgcaggggttagaaaggggaaatctgcaccaaattcccagtgtcgtgttgagatggataaacgaggccatgttaagttgtccagattgcctctctcactaccactttaggtcggggaggggagagggcagatgaagattattgccagtggcaaaggaaatggaggtaggtgtacatgcactggctattcattgccttctctggaagtcctttgagtgtttctttctaattcttgctatttttcctgaagatgaagatacataaacacacagaattagtgatttcccctaccactatatgcctacaagaattgaggtgtcttcttatctttcttatctttgatcatctatattttcttttgttcaaaaaatatttactggggccttcattggtcaggtttggggccatgggcacaggatgcaaagattaatataggaaagagtctttttttaaaaaaattatttatttatttatattattattattattttttgagacagaatctccctctgttgcccaggatggagtgcagccccaggctctacctcccaggctcaagcgattatcatgtctcagcttcctgagtagctgggattataggtgcgccaccacgcccagctaatttttgtatttttagtagagacggggttttgccatgttggccaggctggtcttctgacctcaagtgatcctcccgcctcagcctcccaaagtgctgggattataggcgtgagccactgcgcccagctcgtctttttttcccccctgaaattagttttaggtcatgaaaggagtctgctttattgaggcatccacatgctggctgagaagaaaaaaaccattgattttaaggtgtggtacaatgtggtagatgctttgacaggtagataggtgcagtgctttaggaacccagaagagggaggcagaacttctagttattgtttggaagcttgtacattgttatgctttatacagtggttgtatagtcccaaagactttgattgcatgtttataggtattccctatattaacatgttttgggattttctacatcatccctcagttcctgggtaggcagtgggacctacaggttaagagtaggggacctgtaggtaggtagacttggatttcaaatctgggtccctgcctgaccttccagctgggtgacttagataaattacttagtcttccacaaccagaaaggagtgtgcaagtgctggggttaaatgacgtgatggatgcaacacatttaatgatgcctggcatgtagtaggtgcttatatgtatatatatatgtgtgtgtgtacatatatagtatatatatatatcgtatacatacatatatagtatatatacagtatatagtatatatagtatatagtatatataaatatatagtatatatagtatatatgcatatatactatgtatgcatatatagtatatatatactatatatatacatacacagtatatatactatatatactatatatatacatacatagtatatatactatatatactatatatactatatatacacatacatagtatatatactatatatactatatatatacatacatagtatatatactatatatactatatatatacattcataatatatatgtgtatatatagtatatatgtgtatatatagtatatatgtattatatatagtgtatatatgtattatatatagtatatatatttattatatatagtatatatatgtattatatatagtgattgattagctttttttggtcgtggtggtggcagtgacaagaaacttgtttatattaagcttcacgtgacacactcaaagttgctgaattttttaaaatgccatttattggtataaaaaccatttatacattatataaatacaatataaatatttctttaaaaatatgtataagttagccatttatttgaggtaagcctacactttccaagaaatgatctggctctgaaacaaaggatattcaaactgcatagccactttccattattatttcaaaactaatacataaaatgtttcaagtggtacttcttaaaaatataaatatgacttacataaattaactcagcttcacatatttaaatattaataaattaaaaataattaaaatagtgtcctaacgctcatacttttagttctccatagagaacaacataagttctgtgcccagtggacaggtttctgaccagaagaaggaatgcccattaacaacaacaatctgaggtgcccatgctacatttgccgaagagccctcaggctggactgcaggaactccttaaagctgcgcagaatgagatgagttgtcatgtcctgcagccactggttctgtgcctgcagcttcgtcagcaggctggcatttgtggttgggtcaggggtggttattgcatctagattctttgcctgaaggaaaatgaaagtaaaaaggattgtttaaatgttgaataaatcctttgcagtggagggatgctctgggctatgggatgatgttcaaatgtgaaatgtggggtgaatgagattaactggggtgcctgctctgagtaggacccttccatagcaacaaacttcttttttttttttttgagtcaaggtctcgttctgtcacccaggctggagtgcagtggtgcacagcaacctctgcctcctgggttcaagtgattcatgtgcctcagcctcctgagtagctgggttacaggtgtatgccaccatgcctggctaacttttttgtatttttaagtagagatggggttttaccatgttgaccaggctggtcttaaactcctggcctcaaatgatccacccacctcagcctcccatagcgctgggattatatcagcactgtgcctggctcacagcaaccaacttctaatcatccctttgctgttctgtctcccattagaccacaagcatcctgagggaagcaccactatcatttttgtttgtttggttttggttttttgtagagatggggtcttgctatgttatccaggctggtcttgaactcctggccttaggagttcaaggagttctcaccttaggctcccaaagtttagggaatacaggcatgagccaccaagcctgaccagcatcactatcttatttgtttgtattctgtcatatgaaataatgcctggcacatagttcatatttagtatatgaatgaagagcccatacttaaaggcattttaatatgggttcttcagtggcctctaaatctgatacttttctccagtttccctctcaccatccctttaggatctgttgaaagaccactgatccggtggtgtaaagaggactgggaaacacctttccatagacccaccatatgggataagtaacttgtggaaggccttaaacctccaagtgtggtcctggaattctgcagcatcaccagggatataagcctggtagaaatttgaccctcaaacccacccgaggcttgctaagtcagactccacaccacaagaagatgcccagggaattcccatgcatgttaacatatgagaaaccctggcttaagtagaaatggcagaggcaggatcagcaccaagggtttcattctaggccccttcttattgagctttggctcctccacatgctagccagcaagtctactccctgctgtctgaatagccagctactggtggccaaagcctttggtacctctttccacccttgagtctctgaccatttctctgaactaactctctggtaaaaggtaggaaaaagaattgaaacaaccacagtgagaagaatgtcacttggcaatgactaaaatcttaaaatcattttgtgctccttggtctttgtttctgtggatcactggctggagttggatgcacttttttctgcccgcccccccgcctttggttttaaatctcttgcactattaaaaattgatgttaaaatccacctcagttaatatatagtttaaaatacagttattgatgtcctttgcagaagagagccaaccaaccaaacaaacaaaaaaagatttaacaataacaatcagaaactatttctcagactcttttgtttacgtgtagccttctcttttggaagtggcattgcatccctgagttgtccaggacactgtctttgagcctgtcttcccccacaccaagttgagggaatgaggacacacccacctttttctgcaggaactggatcaggacttttgtactcatctgcacagctctggcttgttcctcactactctcaaatctgttctggaggtactctaggtatacctcaaactccaaaagaccagtgatgattttcaccaggcaagtctcctaagaggaaagatggtgggaaaattggttatcgccaggagatagaatcaatttgaaaagttaaaattgccacagttcgacatcttttccctctgctcctctagagaacttcaagtacctcttaggcagcatgttttgggacattggacagcaccattttaaataactggacaatcagaggccccatgtaattagttttatccaaagcccaacagatgctagaatgtggcaatggggatccttctctgattgtcccccttgatgttcttcctgcactcttgcccttgttaatgctgggctggaacctccttttataaaataatcagaagacagtgcaggttatctcactgtggagaatgagctgggcagggagggagggcagacctggaccctgccaggggcagccagagagggaaaaggccctgagagtacctttcccaggatgaactaattaaacctgtgggagttttaaacatttgacagttgttaaaatctcaccacagtggcaccatctctggccatacctgtccaagaataaactgcctttaaaaaagcttgaagttggcctcctcatgaaatttacataacattctttacatttacccactttttgttgctgcctggatctatatgtatacaggcactgcatgcaagagggagaagttttgcctaaggaatagtgaaaagtgagtgcgacaagttggtacctcattgaatccagattggaagcatccatctttttcagccatctttggaaggttcaggttgttttctgccagtgcctctttgctgctttcacacatgttactcttgttacatgtctgggaaagaataccagaattgttatcacctaagtgtccctaaaacaaacaccactagagggccttttcattgttcaaccacagccaggaaagtctctaagaaaaatgaagctacaactcattggcatcctggcaagcaaattccagtggagtgggggcacacttgggttcagttccaagctcacctgtgactttaggtgtgttacttaatcctgagtctcagtttccttatctccaaaaaccttccttgcaaatttgttttgaagattagacacaatatttatttaaagtgcctggcacacagtagatacttaataacagcaattttgacaataattaggagaatataattcaagccatagaatgttccagcaggaaggatctatgagatcacctagtccacgcccaattttactgatggagtccagaggtggtagggaatttacccaagatcacaaggctggtttggcagaaccagaattcgagtgtgggctcccaatctcccctcctgtgttcttttctttctaccaaacaggaccaaaataccttgcattgaaagtggggagatgctttaacctatttatgatttgccactttggtgggctctgaggtatgaatcttagctggaatggctttgaggaatcctagccattgagtttacataaccaaaaagtactgcaactgctctgagaagctgaacatgcctttcaggtggcacttttctagtccttccaaagcccgggggacaaaaaggagcttcacagacctaattttttggaaagggaaaaggaagccctgagaagcaataaccctcagctcatgccaaaggtgggcatggatttcagacccattctgcattttccagaaaggaaaggaacttcctgacaccagcaaaggataaatacagaagtcagtctagtcggccccgttggcctcaaatctacagtgctctagaacccagcaaagacctcctaatgcaggcagcccccggccacacgcaggggcaaggggaacgcatgcgcaccgggcccttcaaccccatcgccaagcctacccacctcctttctcagggctgagatgccgtcgaggatgtaccgaatttgtttgtcaattcgttctgaagaggtgagtggctgtctgtgtggggcggctacatctttggaatcttctcctgggggtactggggcagggaaggcagcaggcaacaccaggagcagccccagggagaaggcaactggaccgaaggcgcctgtgccggaggggagcgagcgcaggggtgagctgacagcacagctgggagcctgcctctgctgctggccgcccgccagccctccctgggccacacacccctccctcacacagggctcgaccgccgctggcagttccagggctaaggatttcctgcacttacttgtggagaaggagttcatagctgggctcctggaggggagatagagcttctctttcgttcccggtgggctcgagggcagaatgagcctcagacatctccagtcctatatttattgggggttgagactctaatattgagactcatgggaaaatcccacatttgataaatctttgttggagggtgagggtggggccagagcgggtggggctgattggaaaccttattaagattgtgcaatgtgacgtcctttagcatggcaagacacaactagggggaaaagtgcagcttaggtcgtcattgaggctagcgctaagaagcagaaccactcttcctttactttctttttttcttttattagtgactcagcactttggcatgtcttgacaaagagtaaagctgaagtcatgcacgaagttttacaaagagaaaaaaaataagctaaagctatgttttttgaaaaaaaaaaaattttttttcagtgaccagattaacaggctagaatttagcgttccagttaatttgtatttgtaaaaaccaaagatgttctgaactgagtttcctctgactccatcgcagccccccaagcctgggattatgaagaaggtaatactaccagtcatctgagttcttctgtgttctggctctccctgtgagcggctgttgtagaactgcctggccatcctcaaatttcgtgcagttacttcaaggcgtctccaggtggagtgtgtgactcctttttgccaccgcgtggcttctgccactttcttcacctgcttcagcccacttagaggaggttggctgctgccctgccctctcccaagtgaccccttgggaatcctcccagtgaggactttgctctctgtgccagaggtttgccttgtgctgccagtgctctccccattgccactgagtctcttcaccactgtttcactggggcacctgcatgggccccaggtctcctggagccctgaaattactgaagcccacttggttcagggcagaaagggggagaatactactcacctctttgttggggatgtcaaaggaggaccttgtggcatcttgcagagtttgtgtttatcgctccctctccctgtaagtcttgatttgaaatcaaaagaagctagaaggaaactacggacgcaggcacggctctaggctctgaatctgcttccgcgtcggcacccaagaatttcttattgggtcaagctggttcagaagccctcttccctcaggatggtgtctcttgcaggaggatccttggtctcatgcaaatgggctctagactaggttgtccctccagtctccagagacccagacagctctgagatggcttcaggctgaaaccagacccttgcacaacaccaaaacacttatttaccaaacatggtgttaccttcacaatcggtttctttgctttgctaagaagagatctcttcaagatcgataaaacagtgacctctgttgggcatttactcaagttttgtttcgtgcataacatttcaggacccgcctgttggggaaagtgaggtcatccattcttcaccgattgtctaaacagagacggtggtcctctgccgcggtgggattctttggtgtgaaaatgaaaatgggggaggatggctggatggtttcatttttagtgctctcctgtcttaagcaacgtagacactcctgaaccaagttctctttcctgcatgaaacgaagccactgctcccagctccgcagccgtgcactgtgatccgtctatgtaatgtgagcttgcttttactcaactatctattttttagaaaatacaattcaataaatttcaagtacttgaactgagtgacacaatacaacacacagatttatcttttcaataaaaagtgttttttaaataggaagttcgtgttcatgataaaatgttcaaataggacatcagggcatgcagggaaaagtgtctccttcctctcctggccccttttcccagaggtagcacctaattgcctgtattttcaaccaaatcctctgttatcctagcctgggaaaggttttctcgtcttcccagctgtttgatcctggctgttacatcaaggacctgtgcccttgtttattcacctataaaacgggggtaataatagttcttcctttctagggctgttgtgaagatggaacgtgatgcagtgtaaaaaattcctggcgcatagtaatcccacaatacatgctagctctttgaacattccttggctcagagtctctgccttggagagctcttccagctcggctatatcggttcacctggtgtcttgcctatgaaggaattatgaatgaaccaggcctctgtgccagcaatgagctggtctcccaatcattttccctcaaaagaaatgagattctatgttttgttgaaaatgttttatggcacaaagtgcaaaatgaaaaataataataattttcttttttgagaacattaagatccccaaaccaggtctcttgttttagataattagtccagcttgcgtcttgctcctactagactttttccaagccctccactaagtgtttttatgtcagaattccacagccttccctgtgcatggtgattgccattaattcaaactcctgatagtggccctcgagggtgaaggggcctgatgcttctggggtcaagaaagggcaaactgtgggaaggcatgtgtgtagggagcttggagacactgtctgccccctgcacatcgcagcatggcactttattagtatcaatgctttgggctggaatttgcttgtgggagagatgagctctaccttgctccaaaaacgttaatgtaactgacatgtgcaattccacaatgatagcttccttcctttgcatctcaatggatttttcgcgtggagagctcattctttgttttttcttgttttgttttgttttttctcttgagaaggagtcttgctctgttgcccaggctggagggcaatggcatgatcttggctcacttcaaccgccgcctcccaggttcaagcaattctcttgcctcagcctcctgagtagctgggactacagatgcatgcgaccacgcccagctactttttgtatttttagtagaaacggggttttgccatgttggccaggcgggtcttgaactcctgacctcaggtgatccacgcgcctcggcctcccaaagtgctgggtttacaggcgtgaaccactgtgcccagccccttgtattttttaaagggcagctttaggtcatagcaaaatggagaggaaggtacagagatttcccatatatccccctctccccccaactctcccccgtattttagtatgaatacgtgaccagaaaaggctgtgctgtcagcatttattaactaatactttagttgctggattgcatcatagctgatgtgaagtgagcgccagctgagatcaagagaggccagacaaatgggagtgcacagggaggaagcagcaacttggcttcctatgccaccagtgtggggctggcatgtcctatctggatctcccagaattactgcccatgactgctttcttacgtgatggtggagtccagttcagaatctagtaatacatttgagaccaagggggaaaagtagcttccatttggtacttaagctctcaggaggagaagtgttctccacgtctcaggagttaagatgtagtgttgtgctctttctctatattctgggggttggagatggatgagtctgtgatttaacaggagggagtacagcaagaaaaaacgggaagtcctgggtactagggaacttgcagttgctgccagaatgtagtttcacttgttgccaagtcgtaagaagtttgtaaactgaaacagtgggtgatttaacagcttcttctggggttgagtcccactgagcagacaccaggctctaaggctctgggaaatgtcctgctttgatggtggtattacttgaagagagaattttagggacatgtggtgtgtcaatttagaaagagccagctgatgttggagggcagccaggcctggtgaccaaagctcttgacagtttcctgcctggtctggtctcagtcctggctttgcagcctcagctctgatgtcctgttgtagctccttggtctggtgaattcttagtctggcctcagcttttctgagggggaggatgttcaggggctggacctagctcctcctagactagagaaggggcacatctgccctgctgtgtttctcattcaaaactctatagggaggtcatctgttctgtgccctcattattttgctatgtgacttaccttccccctgctgaagtggaaaatcccaggcatcttgggagggaagtagcctctccgggggcaaaaagtgtagattctctttgccttgggacacccccgtacccctttccctgggtctctaggcttggaagagagtgccctgattgcaaacttctctgaagctagtttgctgatgagaaaaatggctttgctggtcctgaagaagccccatttggccctgcccccatggctggggaggtccctcggactgagtttcagtgctttgcctcttctccatctgtggggtaggctttctatggtggtggccactggttctgctttataattaggaaacttcaatttgtcagcgagcagtaatacgttcatttattatcacgagtcatttgagccatctttggtttctccaaagatctcagttctctgagttcagtgtcatcagcagaaactaagcatgcaaagcattggctggtttcctctactcttttccctcaaaattaaggtactaagaacccatttgaaatcatcacatgtaatggccagaccaggggattctactggcctggttatgacgtcttttacctcccttccttgcccttttggttagttatttgctaaaaggagagtgtcttagtccctctgaactaagcctccttagcaagctgaatccatgaagagaggccattctagtcttcatggtggaataatttccacgaaatgctttggacatgttgaggactctgactctgtaattctgagacattggggtccattatttctgaagatgggtacacctggattgatttaaaatgttatggaagaattcagatccaggtaagcaagttgaagaatcataggcaatttcttcaagctattgaattctatgtcatgtgtacctatgtatgtgtgtggatgtctgcggcacagagcagagcccttggtctatagacctaccatagatattgttccaaggggtgctgcctgcctcatatgagtgtggccttacaggcctgggtacccagaaagcctggaccggccatctgctgtcacttttctcccaggcctgcagcccttcctgtgctgctggatctgtacagtggtctatgtctgagccacattactgtgtcccccaagggcactgtgggattccctatatctctcaccctggaagccatattttctatgtgctacttttctgtgggtgagacgggggtcggggagaggtggggacaggagggaaggcacccatcagcttggcaagtgatctggatgtgtggaaatggcttcctattgctaaaggcttgtttggaggcttgctgcctaagcagttgccaccaagtgcctcagatcctcctatctctctaggacaaccaatagagaggctgtcatgcacattctttctctgtgttaagtttgtccaccatgggcccagtgaaactactgaagacaccaggtatgtagtcaggggcaggtcaggtgtcagagggaaatttgagtcctgggctgtttctgtctgacattgtgtgggtaatcggttggccaggcttgtaaaagccctgttgcccttcttggcttgatttagactgcaggattcagaaggaagtgggggttttatactgccagcaaaaaattttggctgaatgtagggtttccctgaattaggcttgtctttttactgcattgccaaatcctcggcttcttgtgtcttgggagtgtagctgttggcagatgaaagtgttcagatgacgatgaactgaggatttggggcaaagtactctcccaccttaggggtttgctgaattccctcctagctccaggattctgtggttctgtgattctgtggattttcattagccatgcttattaatcaagagtctactgttaatgggactacaggaataggagtctctacattaagaaatactttttgaaagcccaaaagcctgatgctgtcttctagttcccacccaaggacctgttagtggaagtgctttgactgggcagggtgccacccattttgacatgcccagatcttagtggcttcagggagactaaactgattcaggagattctagagccctggtaagggctgctacctgaaaggaggtagcagatttcttaattattatacaagcacaattattatacaattaattatttcttaattattatacaggccagaccaggcttcctgggtacccaggcctgtaaggccacactcatatgaggtattcaaattaaatgtttttaatttaaaaacaagtaatacattttcaatgtagaaaacagaaaagagagataaacaaaaggaaaaaattataaaatacattatcttagtacccagtagtaatcattgttatcactatggtgtaatcattctagtcgtttgtacattttttcatatgtatctaggtgtaatgggaaaatgccatccacggcgtttgataacctgctttccctatttatactcctttgtatgcgtaacattctggataactctgagtagaggtgaagtaaataatagctgtaggtataccaatcagagttcagaggggaaacatcaagtgaggtttacagatgactcctgcatatgcacacaattcacttgttaaggcgcggggaaagagttcatatcttaatggggatgagatgcatttaaaacaatcactgagtttcctggagggttaacttaccagttgttcatggagcagtgtaatccctaaatcaagctgtgcaaattgtttggcatcatgaaaatgagtttgcagttcagctgaactttgcttttcagctggttctgggacataaccatgcttttgttggaccccacaatgggcatcagtagctcattgctcttccttggtggcaggacctacggagaattgtcatgaatgatggcatcatcatcttttctcatcttgtgtggcccgttacctctaatacattgacatttcttataaaggtctgttttgcaaggcaaaaaaaatgtaaaccttgataaggactttgtagtcttgtaccatttctctcctttccatctccaggtctggttgtatctccctcaggtgacctctcacttattgtgattgtgttacttgtgcaagagaaactgcatttcctgtgggtgcagaagcaagacccaccacaaagcagagagtttctcttgataacggtcagggaaggagtttgagtgtttggccatggtcttgcttgaggattctgagatgctaaaatgagctactgttgggttttttagcatttcttctctctctagaactcatcaaaaatataatagtaagcaccaatgtggaatagttttgaggtactgagtgaagtcctttgaggattcgtggcctttgaattctataacgacaccattgttttccttctaaggtactttgagtaattgacatgtaggattaatcaggtatttattggatgccaggtgctggactagaggctttacacacattaattcatttaaacttcactctatggaggtgactattttattctcactttatggataagaaactgaagttcggagaggttaaatgatttatttacctgagatgatgcaggaacccagaatcatgaaaaaagttcattggtctttgggagaagaggtaaaatggggtggtaaattgggggtagggttgtcagaagaacagtgacatgatgaaagtatttcatctgagtgagcaggaagaagaccccaggggattgtagtctgggaggtgggctcagaggctgttgcaaacatctcagcatgacaccagatggaggagcccaggcagggttgcacaggagctggccggttcaagagagccaactgtactgatctcttcccaactctacattaagtgactcctgatggtagcttgaaattagtgtggaaacattacaccatggaaattggcaaatgctacaatcagagccctcccttccctctgttccttagctagttgttaaatatcttccagaccataagtgggtccaaggaaataaaaggatattttgaaggcaaaatcaatccattccagagattagttatattgtatgagctctatttggggagtgtaagaaaaggatgtatcaaaggcattaaggattatttgatcttctctcatttcaaaggcaattgatcacaaagctttttaaggaaagagattgttctggtcaaagtatgctgcttctatacctcagaatgaaggctgccacttttataaacagataggcacaggctgccacctgaatgagggagagttaggatgtgcgcaggacacaccttgtcctacagaattatatgcgctcagattttccccagccacgtgctggatcatggcttgatggatcaaggcagaggctgagcccagcttttctgagccatgggataagttagaagcagaaagttagtcacagtgagggagtttgctgctgcacagcagcagcccaggggcctagggatttctgctttgtcactgtctgtcccatccagagctgatgaatgaagaggctggctttggggccctgagtgaaaaggacgaggagagccctgaagagttctcagggtctctaaaggattgctgcttcttggatcataagtttactcttaactgtaacagaatgacagaacgtcacttctcctaatattattcttggcatagcatcttgtgctgcgtccttcttgtgattcatctccattacagttctgttacatatttctacgatgttgcattagaagaacaaacagtgttgttaaatccaattccctgtcctcttccaacagtacccactgatgacaggaacctggttgatacttaattgtgtgatagctaaacttcagaatattgagtaaaatgtaaaactccctgaaggaaatttggttccattgcatggcacagctcccaggcaggtcacaggagactctatgctacatttttttttttctctccgaagcatgccagtctttttagaacagtttcagtgcagggtagaatgccgtgacgtctctgtgttctgaacttctgtcaagactcaaatcatgcctcgatcctcccagaagcctctgctgatcaatttccaggaatagtgcaggttctcctctgggctctcccgcaggggcatgtactgtactaatctgtttccgggcagtgttgtgatggcacaggctctggagccaaactgcctaggttcaaatccttgttctgtactttctaagctgaggtccgctgggaagttaacatctgggcttaattgttctcattttaaaaatggaggtagcagttgcaccttatgtcacagagttatcagaacctatgtaaagtgcttagcatctgcctggcacatggtagagtcccagtaaacatgagctattaatactgttattattttctccccagttgattgagagtttcttgagggctctatctttcttgtgcgaaggaatagcatgaatttgagtacgtggttggtgcacaggatggtaaacgaatgaaagctgggatctccttggaatttatgtcttggaaataatcgtcaaagatttagaagtaaagaacagtttaatttataaaattttctttgtatatgtgctttctaaaagccatataaaatattaagcttatttgatttacaaattagaaacaaagatggtcatactttacgcaaaagttaagaaaaaaaatacatgtacttattccatatcacaggcagtatggtttactagagaaaacatggattgcagaggccgacttggtttaaatcccagctccatcatttacagcttgtgtgggtttgggcaaggcacttcaattccctgtgcctgcgtttcctcatttgtaaactgtggcaaataatacttaaccatctgggggtggttgtgggaattaaatgaaatcctatccattaaggacagttattggtatatgctaaattgttggtagatgataattgttgttgtttagttgttgatgtattagacagaggtggggcaagggaaacagagaggagaagggaaaaagagagaaaagcatcaacatagacaaagcaagaaggggaaaggcagctgaaaaaaaaaaaaagcaaaacccaaaatgaccaccaaaaaaaaaaaaggcaaataaagtggctcatagatttcatttggttttgaaatgttttagaattgttttttgtagagacaaggtctcactatattgcccagactgattgtgaactcctggcctcctaaagcacaggaattacaggcatgagccaccacacgcagccattgttttaaaatgttatatgttaagtttctagtttttacataggtaacacatacccatggcacaaaattcaaaagataacaaagagtacttagtaacaaaattacaaaaaaaatttacacttccaccatgtgtgagccattaggggtaactactgggttcttgtgattccttctagaaatacttcatgcatgtattagcaaaatattcatatttcctaggatttatttttattcttctacataagtgatggcacatcagttacactgttctacattttgctttctttattgaatgggttttagcaatcatttcttatcaggagatgcagaattgcttcttcctttttagccttcgaattccatgtatttaaccagtcccccattaagggaattttaggttgtttccaatcttttgttattacagctaaagcggcaatgaataatcttgtccatgtgcgatttcatacatgtgagtgtattagtgtgatagtttcctagaaattgaattgctgactcaaaggatatgggcagttttgagacagagacaggtagaggttgtacaaatttaatactccctccagtgatgtatgggaacagctgttcctcatatgtttgtcagcacatgatactgtcagttttcttgatctttgccagattgcagagggaagaacttatatcagcgtagttttaatttgcatctctcttgtataagtaggattgagcacctggtcaggtattcaagaaccatttttattttgttttccgtgaattctatgttcatatccgttgtctatctttctgtcagttattgatccttttccattgattcaaagcccttcttgatatattccaaggagcaaacgtttgtttttcacatgtcttttaaaatttatcattcgtctttctgcttaatttatagtgtttttgccatgcagaaagttttgatttatatgaagcagactatatatcctttcttttatgcttctagattttgtgacatacttaaaatggcctatttagtctactttgatacaatgaaaatattcttccaggttttcttcaagtttctttaaataataggttttgaaatattgggcaaattcagactatgcttgtcacacgacaagatgaactatgcttgttacacctgatataaatacacatacacgggaagaaatgtaggtatgtctggaaggtagaatgagaaatacttcttttcctctttgtagttttctttgttttccaggttttctgcattgattatgtattactgtagtactcatgaaaatgttaattaaatgcaagtttattttgaccattttaaacctttctttaagattcttggtccctggatctctctgaatgctagtgttgccgcctgttttgctttggaaactgtttggcttctacccagaatagctttgacccactccaaatgacctcttgtggctaaatccaatgaaacattctggtcctaagcttgccttacctgtagcccatctgaagctactgaccaccccttcctgcttggcctgcctccctcctctctccctgcatctcctccttctggtggatattccctgggccctt

SEQ ID NO: 47 - DNA, 30808 bp, Mus musculus
cctcatatgacatgtctgggaattgtgccatgtaatagaactgagtttctgtgagggatttcaaattttactcaatattctgaagtctagctaaaacacagttaagtgttgaccaggttcttatcatcagtaggtactgtcgaaagcagttgggggttggatttaatggcattgtttgtttttataaggcagcatcctagaaattagcaactgagctgcagcaaagatgaatcagatgtgatgccgagaataatattagaagtggtgccatgccactctagtgaacttgaaagcaaggcacagttcaacaacaaacagtcttttggggactctcaaagtcctcatggctctgctcatcttgtcttacaaacggcctcaaaattagccttttctttctcatcctcccagaccaggatgaaacaggtgcacaaacctagtcctaaacaggatgaaaacctaatcccaagatgtctctgtattggtcaaatttcttcatggtgtaactatcctttagtcttaatatggcttgtaagagctagacttgacctctgcccatgcaggcaagatccatttccaggctggacaaaatccaagaacatgtgtagaacaaggtctaccctgcatatttcctaattctcctttaattcagctggatgcttttatttggggggcacggaagaagcagcatactttgaccacaacaatctttttaaaactacacttatttattttatgttcatgggctcattgtacatgtgccatggcatgtgcatggagatcagagaacaatttgtgggaattgtccctctcctaccatgtgcgtcctggggtttgaaatgggctcatcagaatgatgagtgaggatataaagtgggttcatcagaatgcctttacttaatgagccacctcaaccaacctccacaagaatctttaatcaaacattctttaatatgtttgctgtgtctttttcttatgctcccaaacagtattcacataataactaatctctatgttgaattgattgtaatgtcaaaatacccctgcatttccttggccagctgacgtatggggagatatttaacaactcactgaggaagggagggaagtaggaggaggggtctgatttgtagctcctgccaacagttacattataaatattttcatcttgtctaattctaggttgccaccaggagtaactggatacagagttgggaagtgataagcacagttttctcttgagcctaattgaaccagccagctctagtgggtgtgcccactgcgttctatcctctcaggggaatatgactgcaacatcctccaaaccctgcttcctgacttcaatcctgggatctttattctgccccctcagataacactattcccactatttcatagcactattccctgtttgatccatcttccttggctcttctttctttttactgccacctagttttcaatgtccttggtcctgccaaagaaagttattgcttttaataataatacagaatatccactggaatttcagtgaacaaagaacatgttttagcatgatcatttgatatatatatattacaatattacataaatactagaagtttatttgtatgtatctgaagtttatatgagtaacagcttttatctgacaatcttattcctgacccacccaaacattgatcttaggtaagttactaaacctcttagacattcttaatcatcagggaaatgcaaatcaaaacaaccctgagatttcacttcacaccagtcagaatggctaagatcaaaaattcaggtgacagcagatgctggctaggatgtggagaaagaggaacactcctccattgttggtgggattgcaagctggtacaaccactttggaaagcagcctggtggttcctcagaaaattggacatagtactaccagaggatcccgcaatacctctcctgggcatatatccagaagatgtcccaaccggtaagaaggacacatgttccactatgttcatagcagccttatttataatagccagaagctggaaagaacccagatgtccctcaacagaggaatggatacagaaaatgtggtacatttacacaatggagtactactcagctattaaaaagaatgaatttatgaaattcctaggcaaatggatggacctggagggcatcatcctgagtgaggtaacccaatcacaaaggaactcacacacaatatgtactcactgataagtggatattagcccagaaacttaggatacacaagatataagatacaatttgctaaacgcatgaaactcaagaagaacgaagaccaaagtgtggacactttgccccttcttagaattgggaacaaaacacccatggaaggagttacagagacaaagtttggagctgtgacaaaaggatggaccatctagagactgccatatccggggatccatcccataatcagcttccaaacgctgacaccattgcacacactagcaagattttgctgtaaggacccagatatagctttctcttgtgagactatgccggggcctagcaaacacagaagtggatgctcacagtcagctattggatggatcacagggcccccaatggaggagctagagaaagtatccaaggagctaaagagatctgcaaccctataggtggaacaacattatgaactaaccagtaccctggagctcttgactctagctgcatatgtatcaaaagatggcctagttggccatcactggaaagagaggcccattggacttgcaaactttatatgccccagtacaggggaatgccagggccaaaaagtgggagtgggtgggtaggggagtaggggggagggtatgggggacttttggggtagcattggaaatgtaaatgagaaaaatacctaataaaaatattaaaaaaaaagtaggggctggagattgaacacttgctctttctgtttgcagcacatacgtagtgctttacaatacccataacttcagttctggaggatccagccccttttctgacttccttgggcaccagtcatgcatatggcacaaatacatatgtgcaggcactacacaaaaacaaaaaatagaaagaaataaatccggttttaaaatgaaaaaaaaaaagaagtttatatcctcatctttgaagtgacattaaatgattcagttcttcttaaagataacccaagggcatttcaatctgcagaatgagctttttgtcttgagcacatccttacccttctaacttagtttggcttgcacctgtctgttatatgagaccagcattgcacttaggcagacatctacctggtggatgcttgagggcccagcttgctgtggtgatagatgcggtgctgaagatgagaaagaagcttgggtcatctctctggcttccatctatgaggtagaagggacattttattttctacattgcacattatagtctcatagctcatagaaaataaaatcacacagttcatggtttataaaaaatttgaaactcatgatagtagttttcaataagcatttacatttactatcaaccatgaaagatgggaagagatgcaaggtctagctccttgagtaaaggaatttttatatgtaggaatggaattagatcttctactaatcttgagttaatgcctgatgaattccagacaaaaatgggttgttgtttccttcttttagccccttttggttctgttctctccaggagaacccacttgtgctcagctcctgctgctatactactaccttcagtctgtcatggaacataataatattatctttctggaactgagtgttcctacaacattgataaataattttccaaactggtctccattaataaaattgtgttgccaccatttagcaaggtttactcttgtaagaagaaacaatctgctataagtttaacaaatcccccatttgggtttctgtggtcatggtagcttcgtttttcatttgaggtttaatattgtttataaaattcttaaataacttagacaagaaaaagggcattcctagtaattggcattcaataaatatttgtttgacttatctggcaatctttatttactcaaagaagtttagaaagagtgaggtaacccaatcacaaaagaactcacatgatatgtactcactgataagtggatattagcccagaaacttagaatacccaagatacaagatacaatctgcaaaacacatgaaactcaagaagaacgaagaccaaaatgtggacactttgcctcttcttagaattgggaacaaaacacccatggaaggagttacagagacaaagtttggagctgagacgaaaggatggaccatctagagactgccatacctggggatccatcccataatcagcttccaaaaggtgacaccattgcatacactagcaagattttgatgaaaggacccaggtatagctgtcttttgtgagaggctatgccgtggcctagcaaacacagaagtggaagctcacagtcaactattggatggatcacagggcccccaatggaggagctagagaaagtacccaaggagctaaaggggtctgcaactctataggtggaacaacaatatgaactaaccagttaccaccaccaccaccccaccaccccactcccagctcgtgtctctagctgcatatgtatcagaagatggtctagtcggccatcattggaaagaaaggcccatcggtcttgcaaactttatatgcctcagtacaggggaacgccagggccaagaagtgggaggggggaggggcttggggggcaggatatggggggacttttgggatagcattggaaatgtaaatgaagaaaaatacctaattaaaaaattcatttaaaaaaaagaaagaacacaatagagtcaaaagataggtcttctcgtgacttcagaaagcatatcaaactatcacaactggtacatataactgtatcttttaaaggattttaaatcttagtatttgctgaaatacttagtgtttactatttcagcatctcatctgagttccgagaagttgtggattctctccttatccacatcagccccgcctcccccacggtcagctccttgctgcctgcttgtgatagttcttactatcaagatacgcagtttctcttgcacaagcaagactatcatactaggtaacttagtcccctgggaagatacaaccagatcttaagtaaaaagagagaaacacttcaatggtaatatccttttatcaataatccatttgtcaccttgtgaaacaggccccagtaatgaatttcaagatgaagtaatgtgacatatgaaaagaagagtgataaggtcagcctttgtccatgaaaatgatctatacatcttgccatccctgaataccaattagctactaatgcccactgcgagtccaatcaggactagtctgtgttccagaccagctgaaaagcaaatatcaagtcaagctgcaaaatgtgcatggtgtcaaacaaccagcataacttaataatttagagatgccattactgcatgaacaaacaataagttaacctttgggaaatcagtgattattttcaatgtgtattatcaatactaagctatgaatacattccctgtgctttgtgaacagtgagcatctatatacttcacttgatgcttcccttctgaactccaactagtttatattcagagagttactctgtgttgtatatgcagagaaatacaagaaagaaagaaaagccaagccaggtctggtggcatgaatttgtaattctaacttttcagaaagctgagaatcactactaacaatctgaaagaacaagaaccaccaacaataattactaagaaatgtgctattttattgcactggcatgttttcacacagactctaacttcttgaatttgtttattttgcctgaggccaccaagatcctggacatgtaaaaatggaaagcatcctaaacagctgaaattagtttactgaattttctttgggtatgagcaagatgatggcatcagactttcaagataacattcaagagttatttctcaattctgaggacatatcaggcaacagcccatgatgagtagattttggggtgttgagtggagagctgtagaatcacacagtgtggacagactgttggagcagggaaagaaattggaaagtgtaatatgtggagggcttaggtaggaaaacactgtgctctgacaccctcctgttagtcatcatctcaatgtttgaatctgaaaacagttgtactactaaaatacaacccacggatttagtaatgtagaaagaaaagcgaacaaacaaggacaatttagggaaactctccattcagccaaaagatttgcaacctcattctgtctgaaatctgcattccattcagtaaggctattcagatcttcacaaatctagacaaaagaacagctacataatacctgggcctgagtctccttctaaatacaacttgcccaagactacatacctgggtcccagagtagcttccctagagctgcaatgaataaactagtcatagaggaatatttatcctgtatttacagagccatgagagaatctgatgcagccagcagctgttgcttaggcaccaaacctccaaacagatcttttgccatttccaggcactgtgatcccttgtaaagctgactagtgggaaagtcaggcctgctctctggtcactcactaccttgagttcctgaattttacctacatggaagaaatctggtttcctggatacggaatctcaataagtcatcccacaagagcccagaccttcaccaatatggaggagtcacaggccctgtcagaatagtgacagcagacagatagccctggctctttgaatacttcaaggttatccagcacagaagggacagcattgtagagatgtgacaatagtaggtctgtgggtcaaggaatctctctctcccctgctgtaccaccctaccccaccacatatcacatatacacagagcaagtcacacacacacacacatacacgggagggatgggagagaaagagagagagagagagagagagagagagagagagagagagagagagagagagagagaggagagagagagagagagagaatattcagcaatttcaatgtatcacctgtaaattttttttttggccttaacttgcttaccaggatctgaattcttctgtaacactttaaatcaatccaggtagatctgcgatgaagcaactagacctagtgtctcagatgtggagagtgtttcacacatccaaagttttttgtggaaatggttcaatatgaagattaggcctttcctaccttcatgaatccagcttgcaagactacagcagagactttattcagaggaactaagacattagcaaataactgataaaaaggaagggaggtaaaatacatcacagtcaggccaaaagaatcccctggttttgacacaacatgtgatgctttcaactagttcctactaccttaattttaagggaaaattgatactttgcatgcttagtttctgctcatggctctgaaccgagagaactgagatctttggagaagccaaagtggtttaagtgacttaccagaataaatgagctggtttctcttagctgaggtttcctaatggtgaagcacaagtagcagccactgaaaatcaaccccacagagagaggcaagcacagaaagtcagcccaagggatcttcccggaccggggagagttcaggatatcaactcgatgtcttatcaccaaccagctcggagaggccatcttatcgacacttagggatcagagcactctcattaagataagacagaaatgtgtagcaggtccttaggcagggagactgttccttgctatccatagagccactcctaaaatgcctgggagtttctagttttctagggataagatatctccatgcatagcaaaataacaagagcaaagaagagatgaaatcatagggcagatttgaattaaacttagcatagaagatctaggtttagccctgttgcaggttggaaaaatctaaaactgggtcaagaagttgttaggtactacactgagcaacactgaggctgtaaggccagaactgaaactgaactgtctggcagctatcaagaggttagggcaattagcctggctctcctttaaaattagccagtgccttccaaataaacacagcacccttctccctaacagtcgctctccaaataacaacaatacgttttctcactacaagacattttctagagcctctctcccagaagaagctgttaaattaaccattgtttcactttgcaaacatcttctgccttggtgacaaatgaaactacgttctaaaatcaactgcaagttctctagtaccagtaacttctcttttctctttgagatacgctttttagttaaattgcagacctagtcatctccaaccccagccaaagagcacatcacccaagcctgagagtgtggaaagcatttctcttctagagaggtaaatgtccttcttccacttacctgaaatgtactaataaactctggaatccatcagcacatagaaaagtgcatgtgagtagtaattcagagggatacaatcagccccatacaaaagaagagaactgtgatacacacattctatccctgatctcttgatttgcatctagcttagcatcaggagatctaggtgtagccctgtttcaggttggaaaatctaggctgggtcgagaagttgtgaatgcaacttcttgcaatgctgaagtcctcaaatttttagttagtaatgacaatgtatactagcctttcttgtttattaaaacatactaaaatatgaatgagatttggggttaagtaagtgcagctaaggaaatgtgtgcctcaagttttgctgtgatcttaaaactgcagaaaaaagtgtacgtacacacacacacacacacacacacacacacacacacgaggagtttttcaaatgggaaacccatcaagatacagagaaaagaatctgtgatggtagaaacagagtttagagttactgtgctaatattttggtttaggaagagtctttttctcccataatcaaatgccaatcaaaggcagtggtactaacaaagatctatgctggtggcatacaaagggacaacacagaatcaccctaccttccaacccttgaatatctgactagtagaagctcaagctctggggttgtcaaggccatttatgcctgagaatcatactcagaaacttgaaggatagcgttatgttgtaggctgtaacttctcacataaaaacacttaacagaaggcttcggggagagtctaggagtaaagcacagctgggtaattactaagtaagggacgtagtttgagcatggttttttttctgcacgtgtgaaggtgcagtgtcattctgtatattcagtgccaactgaggctataagagggcatcagaaccccaggaacaagagtcacagaaggtttaaaaccaccatgtagaaactgaacccacaacctcttcaaagagcagtaaatgcaatcggaagttatagagttggagcttatactttcttagtcatcttcatggcagctccgtatgatgatctattattattctcatgttaaagagtaaataaacaagaacacagatcttgagctaacttagccattgtcaaacagctagcaatggagttgggcttctaattcaaattgttactcaaaggctatggtctccacgtgtacccttggaaagctagatagacagcatccagaccattaacatacagtgtgtacctctatgtataaatatgtatttttacacacatttatgtatgaaatgtatatgtataaatatatgagctgagaaagcctcttccagatgaggctgacaagagttccactaaaactaccggggtttaggcatctcctgtgggaccattcttctgatgtcttgtttaaacatttttatcatggatgtatgctcccgacttaaaaagcaccttttttaaaaaactaaaaacagaaatctgaatgttgtagtaagtgtaacaatcttaagtttattcagtaatttaaaaaaattgttaagcggagaaaagaaactctgtactaacagaggcctgagaaagcacacggcagggaataggggaaatggcttccttcattgctggacacagactgagctccaggctgtttcagctgcctttttaaggctcaagggcactaaaagtaaaaccatcctgcttcctctccccattttcattttcacctaaaatcccctagtccctttgtgaagaccagggcttcacacggtgaaagaatggtggactcacttctttcaataggctgacctagtatgtacactaagtccacccatgttttaactttcttcctagtttattccccttctgatttcttcacaagaatcaaccggcttttcattttaatctactctaatcgcctgtgtgtttacactgggttacattctttagagtgtacttatattctccttttgcattctcaatataaattaatctgctagatataaagctgttctctttattttagtgtaatttttttcttcacattgaattctaggagaaactatgctagtgatatataattcttgaactattaaacatgggagcataagaaaacaagaatcttaaggcaatctgcagagtgaagaagctgattgtgatcctgagagtgtgttttgtaaatggttttggattttatgtacagagcctactttcagcctggaatcattctgaatgctagctagatatctggagacaggtggacagaaaaccaggaactagtctgaaaaagaaactaaccaaagggaagaagtctgtttaagtttgacccagcctagaagacttgagcattggaggggttattcagagtgagacgtaccaccttcagattcaaatcctgtcatccagtagaagggagcttcaaacacaagctagctaagatacaatgaggtccttcttcgatatctttatcttccatataccatgaatcaaagaaacttcaacaacatgaggactgcaacagaccttcaagcctccttgcatgacctggaaatgttttggggtgtcctggcagcagtgggatcagcactaacagataagggcaactctcacagagactaaaggtcttaactaagaagatagccaagagaccactggggagaatgcagagaataggcttggacttggaagccaagattgcttgacaacagacagaagatatttctgtacttcacccactttacccacctggcaactcctggaaacaactgcacaaaatttggaggtgaacaaaccattagaaacaactggtcctgacaagacacaggaaaaacaagcaatatgcaacattactgtctgttgtccaggttgggtgctgggggtgggagagggagtgtgtgtctttgtatgatctgaaaaaactcaggtcagaacatctgtagatccttacagacatacaaaagaatcctagcctcttattcatgtgtgtgtgtgtgtgtgtgtgtgtgtgtgtgtgtgtgtgtgtgtgtatgtgtgtgtcgtctgtcatgcgcgcgtgcctgcgtttaaataacatcagctttagcttctctttctccttataaaacattgtgaatttcagttttctttcccatcaagacatgctcaagtgctgagtcacttttaaagaaaaaaaagaagagtgctcatgcttcttagggctagcctcaaggatgacttaagcacactttccccttcctagttgtgattctttcgatgctaaacgacgtcacattgtgcaatcttaataaggtttccaatcagccccacccactctggccccacccccaccctccaacaaagatttttatcaaatgtgggattttcccatgagtctcaaaattagagagttgactcctaataaatatgagactggggatgtctgtagctcattctgctctggagcccaccaagaacgatagtcaattccagaaaccgctatgaagttcctctctgcaagtaagtgaaggcagttccttgccctctggcggagctattgagactgtgagagaggagtgtgaggcagagagccagcattgtgggttggccagcagccatcagctagcagcaggcgcccaactgtgctatctgctcacttgccggttttcccttttctccacgcaggagacttccatccagttgccttcttgggactgatgctggtgacaaccacggccttccctacttcacaagtccggagaggagacttcacagaggataccactcccaacagacctgtctataccacttcacaagtcggaggcttaattacacatgttctctgggaaatcgtggaaatgagaaaagaggtgggtaggctgtgaaactgatgaagacccagtgtgggcgtccattcattctctttgctcttgaattagaaattctctgctgggatctagggcccttaggatttgaagctaaaggtcagactagactgtgttctctctttctcacctctttgctggttttgagtggaggttgggaaggggttcctttcctgtctggaagatacagaatgtgactgcatttctagaaaattcacagtgggccattctctgttccaatttagctattgcttcttaggtggggattccttttccctcattattcctttttccttatctctttgccttcatttatcccttgaagtctacaaggaccagaaagtgctttttggctgaatgtagtaagttctgtgtgtgtgaaatcaggatgctctagggtcagcccagataagatgcatattgtatagagcccaataaagtgctaacacacacacacacacacacacacacacacaacctagattaggctgggcatggtggtggatgcctcccagcacttgggaggcacacgcaggaagatctctgtgagttagaggccagcttggtctacatattgagttccaggatatccaagactacattgagagatcctttctcaaaaaaaaaaaaaaaaaaaaaaaaacaacaacaacaaacaaacaaacaaacaagaaaaaaaaaacccaaccaaccctacctagattaaaatatctcccatctttaaatgaaaagtattttgactctgcttgacagaaaggaaaaaaaaaatcacaaacaagattaatagcctaggtctgggtgtgtagaaccaactttgtaatcttgggaaaatcctcaactatttagtactctttatctgcataattatggagttacagataatggcacagacccttccagatggaatattctgtgacttaaatttatttgccccaagatatcatcaaaatttctgtcctttaccaagttcctactctatgctgggcagtttttatcgttgaatccttgagacaaatgtataagagggacatcaataattctttattgaaacataggaaatacttaggagagtaacaagcttaaagccaagggactgagcctaagggtgcatttttatttattgggctgcttagtagggttctaagaaggtatagcttcccttttctgtgtcctggctatgaaagagcatgacttggccctctagtggtgcttgttgtaagaggtgtttaagtgattgctctggtaatcttttgcagttgtgcaatggcaattctgattgtatgaacaacgatgatgcacttgcagaaaacaatctgaaacttccagagatacaaagaaatgatggatgctaccaaactggatataatcaggtagaaacttgtcacgtttactttcaacaattcttcaaggttctctcttgcacgtgatacctgcatttgtacagtcccagtcaggcaacaaagatggggggatacatccaataccacttggatgtaactggcctgcagtagcttgaatacaaaaggagattgagaggtacctcagcagctgctagggtgagggaaagtttaccaaccagtgctataaatgttcactcaatctatgtccatcaggagctaaatgtttaaagtctctattctcatcttggctttgaggtgttagatgattaaaaaaaaaacattttttttgtctaaaaaagtggaagagtagatataaaacatgttatgtaaacgtcatgaggaaagtaacttacagatttaattaaaaagcagtttatttaaacaggtaaaggcccactatgctgggattcttcaccactgttaaatgttagaagtcatagcaagtttagctagttcatgagccatctcttctctggctgcccctggaaggatccaggcctacactccctactgagaacactcttcacacccctctccttccagccggtgagatagtctacatcaggtctcaggacaagtcagacaagaacaagagtacaggaagggcactgcaggatagaagggaaggagtgagggtcagaagtggattcccactgccacactctggggtagggggtggggggatattaagtggtgcctctctctacttgtccagataattcaggaggtcagctgatgctgcctgttgtctaattctgtagaagatactgaacagcaggaatctttttttcaattttttattagatattttcttcatttacatttcaaatgctatccccacagtcccctataccctcccccccctccccgctcccttacccaccaactcccacttcttggccctggcattcccctgtactggggcatataaagtttgcaagaccaaggggcctctattcccaatgatggctgactaggccatcttctgctacatatgcagctagagatatgagctctgggggtactggttagttcatattgttgttccacctatagggttgcagaccccttcagctccttgggtactttctctagctcctccattgggggccctgtgttccatccaatagaagactgtgagcatccactttttgccaggcattggcctagcctcacacgagacagctatatcagggtcctttcagcaaaatcttgctggtatatgcaatactgtctgggtttggtggctgattatgggatggatccctaggtggggtagtctctggatcttccatccttttgtcttagctccaaactttgtctctgtaactccttccatgggtattttgttccccattctaaggaggaatgaagtatccacatgttggtcttccttcttcttgattttcttgtgttttggaaattgtaccttgggtattctaagtttctgggctaatatccacttatcagtgagtgcatatcaagtgacttcttttgtgattgggttacctcactaaggatcatactctccagatacatccatttgaccaagaatttcataaatccattgtttttaatagctgaatagtactccatttgtaaatgtaccacattttctgtatccattcctctgttgagggacatctgggttctttccagcttctggctattatgaataaggctgctatgaacatagtggagcatatgtccttattaccagttggaacatcttctgcgtatatgcccagaagaggtattgctggatcttccggtagtactatgtctaattttttgaggaacagccagactgatttccagagtggttatacaagcttgcaatcccaacagcaatggaggagtgttcctctttctccacatccttaccagcatctgctgtcacctgaatttttgatcttagccattctgactggtgtgaggtggaatctcagggttgttttgatttgcatttccctgatgattaaggatgttgaacattttttcaagtgcttctcagccattcagtattcctcagttgagaattctttgtttagctttgtaccccatttttaatggggttatttgaatttctggagttcagcttcttgagctctttgtatatattggatattagtcccctatcagatttaggattggtaaaaatcctttcccaatctgttggtggcctttttgtcttattgacagtgtcttttcccttacagaagctttgcaattttatgaggtcccatttgtcgattctcgattttactgtacaagccattgctgttctgttcaggaatttttcccctgttcccatatctacgagggtttttttcccactttctcctctataaatttcagtgtctctggttttatgtggagttctttgatccacttagacttgagctttgtacaaggagataagaatggatcaattcgggctggagagatggctcagtggttaagagcactgactgctctttcagaagtcctgagttcaaatcccagcaaccacatggtggttcataaccatctataataagatctgatgtccttttctggtgtgtctgaagacagctacagtgtacttacatgtaataaataaataaaactagattatttaaaaaaaaaaaaaaagaatggatcaattcacactcttctacatgataaccaccagttgagcccgcaccaattgttgaaaatgctctctttttcccactggatggttttagctcccttgtcaaagatcaagtgaccataagtgtgtgggttcatttctgtgtcttcaattgtgttccattgatctacctgtctgttgctgtatcaataccatgcagttttttttatcacaattgctctgtagtacagcttgaggtcaggcatggtgagtccaccagaggttcttttattgttgagaatagtttttgctatcctagtttttttttttttttttttttgaacagcaggaatcttattctcaaattgaatctattcctagaaagaactgacttccttttccattttacttataggaaatttgcctattgaaaatttcctctggtcttctggagtaccatagctacctggagtacatgaagaacaacttaaaagataacaagaaagacaaagccagagtccttcagagagatacagaaactctaattcatatcttcaaccaagaggtgagtgcttccccatctctcatgcagtgtgggaaagaggacacccggcacctcagggtagcggcactttttccagacagctgctcagaagggagagagtctgaacaacagttcttgattataaggccttgctttgttttactttggggttttgtttgaggttctcttttgcaaagaacatcaatacctgctttaaactgtattaatagaatgttactaattgcgtaagaggtatgaaaactatgacagccatacatagtcacccattatgagagcacagagacaaaagtgactttaatatttaatccttggcaagtgacatttttgtaaccagagttctaatgcagagaagtagccaaaagctaaaatgtcagggaaggaagggatcaagggcttctggctaccattagccagaagaatggtagatatggaggattaatgactcagagtgtgggcgaacaaagccagatgcaataagaagggcctggaatgaaaccctcttgctaaggctgcttttgccacttgtagtttcttgccttaaaccagagagtttcccaatttaatgtgcacaggaaccacttagggtcttgttccagcagggtcttacttaggaggtctaggaagggaactaagattcatttttgtaaacagctgcttgtttatgaccctgctatatagtattcaggctcctaagtagtggggcaagccttccagttagtcttccccatgccagtgggcccatggaagggtgtttccagacttcttcatgctaccacactaagagactctcaacagagtctgaatggaaaccacgaaggaacacatttgttttagattcctctgtgccacctttactgatgggagcttctgttttccagtagaatacagtatgttagcatggatgcttggataacagacaaataagatggtggtgctgacctctggacgcttactctctagtggcagacagaacagtaaggttagaattctgttgctattaaaaaactaataataatcaccttgaaaaagaatggagttgttaggcatgggtctctctcgagtaagcttggaacaaaagcatctcccctggcttgggtgagtcaaagcagatggacttagctcgtctcattcattctaaattagaacttcttcccacagcccagaacacgccacaagaaaaaaaaaatgtgcaatatttaaccagtctttgttttttcctcctttaggtaaaagatttacataaaatagtccttcctaccccaatttccaatgctctcctaacagataagctggagtcacagaaggagtggctaaggaccaagaccatccaattcatcttgaaatcacttgaagaatttctaaaagtcactttgagatctactcggcaaacctagtgcgttatgcctaagcatatcagtttgtggacattcctcactgtggtcagaaaatatatcctgttgtcaggtatctgacttatgttgttctctacgaagaactgacaatatgaatgttgggacactattttaattatttttaatttattgataatttaaataagtaaactttaagttaatttatgattgatatttattatttttatgaagtgtcacttgaaatgttatatgttatagttttgaaatgataacctaaaaatctatttgatataaatattctgttacctagccagatggtttcttggaatgtataagtttacctcaatgaattgctaatttaaatatgtttttaaagaaatctttgtgatgtatttttataatgtttagactgtcttcaaacaaataaattatattatatttaaaaaccagtgactgaaagacgcatctcagctggtaaagttcttacccaacatgagcaaggtcctaagttacatccaaacatcctcccccaaatcaataattaagcactttttatgacatgtaaagttaaataagaagtgaaagctgcagatggtgagtgagagatgccatgagaaagcattgcatataccacattagttaatttcaggtcttgtacattcttttctggacatgagagagtaagggatctaactaagccaccttttggaaacataaaacataatctctgatttgaattcaagtctacctccctctaggtccatttttaacttttagttgtaatttgaagacagatatagaaaaatctcaaaacattttaatatgaattatacacttagagttgatgtcacagattctgagaccatgggactacttagataagatatagctccaaaagataaaagcgccaaaataatatccagaagttctgcctccctcgtctggagtctccatgcactgcatacctcctattagtgtctgccattatatatcataccttaaaactgaaggagctttctatccaactagcatatgggtccctcaagaaagcagactctagtgttttaaccttttcgtgctatatataggtaaggagcctgaacaaaggagacccctataagtatttgctgaatgaaaagagaatagttaatcacagtataacaaaagtcagttcttggtaaatacagagcatttgggtgacattacagtgatgtgttattgtcttttaaaaaaagtagaaaagaatggaaatgaaacattttaaggatttctaaataaggggcagatacaagagtattttgggttttagcccagactatactgtagggggaaagcctgtctcaactttatcccaatttcatatatgtatgtccatatatgtgcatgtatgtgcacatgcacacatgggtgtgtatgtgtgtgtgtatggtgattatgatgatgatgaagagatgatgtctataacttaatgtggttcttcctatttctgtacaaaactgagaatttggtgccaattctctctctctctctctctctctctctctctctctctctctctctctctctctctctctctctctctttttcttcttcttcttcttcttcttcttcttcttcttcttcttcttcttcttcttcttcttcttcttcttcttcttcttcttcttcttcttcttcttcttctttttattattattttatgtacattccagccattgcccccaggatcccctcccacagttcctcatcccattcctctttccccttgcctccgagagggtgctcccccctaccagacctccctcttccctggggtctcaagtctcttgaggattaggtgcaccttctcccactgaagccagaccagacagtcctctgctacatatgtgcctgtggccctcagaccagcccgtgtatgctgcctcattggtggctcagtctctgggagttccctggggtccaggttagttgagacttctgatcttcctatggggtagcccttcccttcagcttcttcaatccttcccataattcaaccataggggtttccaacttcagtccaatgattgggtttaagtgtctatttatgtctcagtcagcttcggattgggtctgaggacagccattttacactcttgtctgtaagcacatcatagcatcagtaatagtgtcaggccttgaacaccctccagccccctgtcatgagatggatcccaatatgggctagtcattggaccaactttccttcagtttcttctccatttttgtccctgcagttcttttagacaggaacaattttgggtcagaaattttgactatgggttactaatccagtccctctacttgtggtcctgtctatctactggaggtggactctctgagttccctctccccattgttgagcatattggctaaggtcaccccccccccattgagtcctgagagtctctcacctcctgggtctctggtactttctagagggttcccctacccctcaccatccaaggctgcatatttccattcattctcctggccctttggtcttctctcctgtccaaccccaatctaatcttgttccctttcccctttcactcccctctctcacccaggtcccttcttccctctgcctctcatgattattttattccatatctaagtgggattaaagcatccccacttgggtctttctgcttgttacacttcttatggtctgtgggttgtatcctacatattctgtacttcttggctaatatctatttatcagtgagtatataccatgcatgtccttttgggtctgggttacctcacttaggatgatattttctacttccatccatttgcctgtaaaatttgtgatatcctcatttttaatagcttaataatattccattgtgtaaatgaaccacattttctgtaactattctttggttgagggactgccgtggactggacttagtcggtccctcaacccacaagaaaccagagtttcagtactcatgtgggcaaggagatggcaaaaaaatgacagacactgacacacagagagtgctgtatctgaatataatttctcaaagcgagcatcagacttatattacagaagaaaacaaataagttatgtgacacataagccaaggtacattgaagttatctgacacaaaacagaaaaattcataaagactgacaggaaccaggcagtggttgcaactgagataaaaggcagccctttctaaagtcagccattaggaagccaggtgaggatttcacaccctagttacaatttatgctattccactgagccttgtgaaagcttgtaccaagggggttcagctcttgcttatgaataatgcaatactgtagttccaccttaaaccacatccctccttcttcctaggccattgtaaattcctgcatatgagagtgaccggctgtaattctaagcttactttgtagaacttgccctgagatttttagctcttatccagtaaaatactgcaagaaagcatgcaaaaccctccacactaactcagggacaaatctggttatggggggggctggtgagatggctcagtgggtaagagcacccgactgctcttccgaaggtccgaagttcaaatcccagcaaccacatggtggctcacaaccacccgtaatgagatctgatgccctcttctggtgcgtctgaagacagctacagtgtacttacatataataaataaataaatctttaaaaaaaaaaaaaaaaaaaagatttaaaaaaaaaaaaataaaaataaaaaaaaaaaatctggttatggggcaccagagactctccaggagacaagtttctgtgaaactttttgcctcaggactgtgtccaagcttttgggcttgccacgcagacttcactggagtgggtgtggcaagagacatctgagttgtttccagatttgtttctggctattacaaataaggctgctatgagaatagtggagtacgtgtccttgtgatatggtggggcatcttttgggtatatgcccaagagtggtatagctgggtctcctagtagtactatgtccagttctctgaggaacctccagattgatttccagagtggttgtaccagtttgcaatcccaccagcaatggaggagtgttcctctttctccacatcttcaccagcatctgctgtctcctgagttttttatcttagccattctgattgatgaaaggtgaaatctcagggtagttttgatttgcatttccctgatgaataaggatgttgaacatttctttaagtgcttcttggcttctgatatccttctgttatgaattctctgtttaactctgtaccccatgttttaaagaattttttattatatatatatatatttgagacagggtttctctgtatagccctggctgtcctggaactcactttgtagaccaggctggcctcaaatctgcctgcctctgcctcccaagtgctgggattaaaggcgtgtgccaccacgcactgcttattatatattttttacagtccagtcactgccccctttccagtctgctctcccacagttcttcatcccattcctcttcccccctgtcttcaaggggatgttctctagaacccctgctaggcctccccactcccagaggcctcaagtctctaaggttgggtacctgttctcccactgaagccagaccaggcagttgtatcccatttttaaattgggttatttgttttgttttttggaggttaacttcttgagctctttatatattttagatattagcactctttcggatgtaaggttagtaaagttttttcccccaatctgtaggttgccaatttatcctattgatggtgtcttttgttttacagaagctttttggtttcatgaggtcctatttgtcagttgttgatcttagagcctgagccattggtgttccttacgatcaagaaaatttcccctgtgccaatgagttcaaagctccttcccactttctcttctattagattcaatgtatctggttttatgttgaggtccttgatccacttagacttgaactttgtgcaaagtgataaatatgggtctattttcattgttctgcatacatacatacatacatacatacatacatacataaatacatacatagttataccagcaccatttattgaagatgttttcttttttccactgcatgattttggcttctttgtcaaagattaagtgtacataggtgtgtgggtttatgtctgggtctttgattctattccattgtctatctctgtacaaaacagtttttatcactgtacagcttgaggtcagggatggtgattttccccagaagttctttgttgttgagaattgttttggctatcctggattttttttgtttttaattatgaagttgagaattgctctttccatgtctgtgaagaattgagttggaattttgatgaggattgcattgaatctgtagattgcttttggtaagatggtcatttttactatgttaatcctgctgatccatgagcatgggagatctttccatcttctgaggtcttcttaacttctttcttcagagacttgaagttcttgtcatacagatttgtcacttgcttggttagagtcacaccaagatattttatattatttctgactattgtaaagggtgtcgttttcctaatttctttttcagcctgtttaccctttgagtataggaagactactgatttgtttgagtaaattttatatgcgaccaccttgctgaagttgttaataagctctaggagttctcggtggagtttttggggtcactgcagtatgctatcatatcatctgcaaatagtgatagtttgatttcttcctttccaatttgtatccctttgatctccttttgttgtctaagtgctctagctagaactttgagtactatattgaataaatagggagagagtgattgttctgattttagtgaatgatggttttgatgtgttcttggattcaatttatgagaattttattgagtatttttgcatcaatactcataagtaaaattggcctgaagttctctttattttttgggtctttggttttgactgagacagaagcagatacttacttacacccaataattggactgaagttggggaccactatggttgaattttggaaggattgaagaagctgaagggaagggcggccctataggaagatcagaagtctcaactaacccggaccccaaggagctcccagagactgagccaccaatgaggcagcatacacgggctggtctgaggccacaggcacatatgtagcagaggactgtctggtctggcttcagtgggagaaggtgcacctaatcctcaagagacttgagaccccagggaagagggaggtctggtaagggggagcaccctttcagggcaaggggaggaagaatgggatgagaaactgtgggaggggatcctggggggcaatggttggaatgtaaataaataaataataagataaaaagaaagaaaagaattggcttgaatgcaaataaaaaaaaattcttaatgcctagtgtgggacagctaccactaagtcattggttaaaagtgtcacagacactaagatatcaggcttctgactagtcatcttcagtattataggttatattttttgtcttttcaaataaaactctagaattagtttgtcaacatccataaaattactttcttaaatttagattggaattttattgaatatatagatgaaagtgataagctgatattatggagtcattctatttatgaaaatggaatgactttccatttctttagttctttcttaatagctttcattcaggtttttggtttgtgttacatagattttaacatatgcttttgatagttttatacctgctttattgttttcctggatgataatataaatggtattaagttttaatgtcaaatttcattagttcactgatagtaagtactagtattttttaaaacttattttatgtatatgagtacactgtagctgtcttcagacacaccaaaagagggcattggatcccattacagatggtggtgagccaccatgtggttgctgagaattgaactaaggacctctggaagagcagtcagtgctcttaattgctgagccatttctccagcccagtactagtattttttagttgaaattatttttgttcagccaggttcagccatgtggcacacacagtgaaactccagaactcaagaggctgagaatggaggactgaaagtttcagacaagttttggttacagatttcaggtcaccttggattattcagtgagctctgtctacaaattcatacattcattttatttattttttgatgtagcagtgaaaattacaagcttgaatagtgtttttctaatcctgtttttattaggagcctcatctacctttctagtgtgattttacagtttacaaaatatttggtactgccaaatattgggcgtggtcgcacacgcctttaatcccagcacttgggaggcagaggcaggtggatttctgagttcgaggccagcctggtctacaaaagtgagttctaggacagccagggctacacagagaaaccctgtcttggaaaaaaacaaaaacaaaaacaaaaacaaaaacaaaaaaaatggtactttacaaatagtaacatatagctataggccaatgagagatccaacttgccaaagtagaaaacatgtacacattcaccttttgctgccagcccttgccatctcctccagagtgggaagaaacaaaggggttgccaaacaaaagcaactgaattgatgctaagaaggtaaatgtacatctctgttttcatctctcactcaaatttcagagtactgtaggccacgtgggatactggaagagtttgggtatttttgtctcgtccttctccccactagaggggagggaaattttaaaaaccacaaatatctaaaacatatccataccaggagatccaacacaacagttctttataaagttcaaagaaatacatgccctgtgtgcatacactcaagagtttagttaatactttaaaatggacaatcaactaacgcagacatcttggaaggcagatatcacaaataaaaagcaaaaaatggccattttaggacacaagatacactaaattaattgaagttacataacagagaggacaactgaaaaagagaactgagaatcaaagtaactcaacaaagtgtcggtctcccaggtccttctgagacctgtctgcacaggtcagctcgcagactgcggaggagagtgagcaagcaggtgagcgagcagactgcagaagcgacactgcttctgggacaagccctgttttgggctgcagacatcccgggcaccttcttcgccagaggagaggtggccgcccaggagggctctgaccaccagagcaggtgagggagccatcttgagtcttgggtccctcagagaccagtctgtgcaggtgagcacacagactgcagaggaaacccatcttctgggacaggccctgttttgggccttcatcttcagcaaggaggcaggtctgaacgccagacctctgtgcaccttccctgcaagaggagagattgcctgaagagagtactctgaccacagagactcagaggagagtaggattcccaggatagctgacagaggctaacaaaatcacaggaggaacaggctccatgcagagacaactataataactaacatcagagattaccagatggcgaaaggcaaacgtaagaatcttactaacagaaatcaagactgctcatcattatcagaacccagcactcccacctcagccagtcctggataccccaacacacccaaaaagcaagatttggattcaaaatcatatctcataatgctagtagaggaccttaaaaagggcattaataactcacttaaagaaatacaagagaacactgctaaacaggtagaagtccttaaagagaaaacacaaaaatcccttaaagaattacaggaaaacacaaccaaagaggtgatggaattgaacaaaaccatccaagacctaaaaagggaagtagaaacaataaagaaaacccaaagtgagacaactttggagatagaaaccctaggaaagaaatcaggaaccatagatgtgagcatcagcaacagaatacaagagatggaagagagaaacacaggtacagaagattccatagaaaacatgggcacaacaatcaaagaaaatgcaaaatgcaaacagatcctaactcaaaacatccaggaaatccaggacacaatgagaagaccaaacctatggagaataggcatagatgagataaacattttcaacttaaagggacagtaaatatctttgacaaaagtatagaagaaaacttcccatacctacagaaaaagatgcccatgaacatacaagaagcctacagaactccaaatagactggatcaaaaaagaaattccttccgacacataataatcagaacaacaataatcagactcagaaaatctcacatcttgcaaacatggtcctagatttacttcagtagatttcacatgttgtagatgtggttctagaacctttgaccatggaatagcaccagaagacctgatttcttgtactgggaaatataatattgcttcatcagatttcaaattataatgtggggagcctgagatagaatttgctggattttccccttgaagaagttgcccttgatataactttggaaatctgacactttgcaggtgtggccctgaaatcaatggcgatttgacaactggcggctcttggcccagattcaaatcctcagatttcacagttggaatctgtgtcccctcaactaactcatttggtgataaactctgaagctctggctctggttttgccttttcaggatctaccactcctagagaagactgttgtactaaatccacagataacttaccttgtgactctagtcctgtatctatttgcatagacttcaacttcaggcaatgtcaattcggtgtttgctgtgtattcatgcagattcatttctgattggttagtaatctttggttcccttgtttgatgctcaggatttactatatttatggattcaattactggatttgatgacttgggaggtacactcactttttgagcttcatttgatggctgtgataagtcagtcttatcttttgctttcctcacagggtcggttacctctgaatgtgaatctgggattattcccattgaatccataacctgaagcaatgccatcggagtgacctttattctgtctgtggctgaacatggtggcttgggtgtcagctttgcatgagttccttgtgccttatgtgacttcatcctttcttctggaagacctatgaccctctgttctatattcagctctaacacttgctttggatcctttttctgtaaagtggtttcttcctgaattgcattaacttctacatgtctggaagatggcctgtccattgatataaccaaaggatagtatctaatgatttggtggtcattctcagattctaactgcttgttggaggtaagtggccatgacattctggcttctgtcctatttacttcagaattgactccgatgttcacatgtagatgaatcgatggaacacctgaagatctgttggtacttggcttggtgctctgagggatgggtgtaggtaactgagtgtgggggatctcttgttcaggaactccttgtacatccatcagatgattgagtgttttccatgacttcttcacaggcagaggtaccacttgtttctgcagagtagaaaccttctgagacatatgtccgtgctgctctctcctgactaacagatctagggattgtaaattagagctaataaaagagccatgagcttgtaagggaggaaggacagcaaaattctggaaaagatctgacttctcagtgtgggtcagctgaaaggtaggcagtggtgtgcttcagttcctggactcgggcaattccttttccggggaatcggggacaatattgccctggatttgccaagttgttctttcaggaaagattggaagataagacaggatccagctgttgttggaggattcagaggatatgctgtagtcagtagaacgtttcctatttttacagtaatggcaatgtgggacactctcatgagccatagtgtcagagatggaagaagacataccatgggattctggtaaatccggttccaaaagtgttgctctaaaaacaaagagagttttcttttcattttctttcgaatgagtagtgggaaaattaggacaaaggaagacagtggtaattccaagtccaaaatatttttggccaaagggatgtgagggtggaaaagggatgctattcacaagcatcagttacttctgtaaagaatccctctaccaaagctcgagtctaagtggatcaaagaactccacgtaaaaccagagacactgaaatttatagaggagaaagtggggaaaaccctcgaagatatgggaacaagggaaatgttcctaaacagaacagcaatggcctgtgcattaagatcaagaatcgacaaatgggacctcataaaattgcaaactttctgtagggcaaaagatactgtcaataagacaaaaaggccaccaacagattgggaaaggatttttaccaatcctaaatctgatagggaaataatatccaatatatacaaagagctcaagaagctgaactccagaaattcaaataaccccattaaaaatggggtacagggctaaacaaagaattctcaactgaggaatactgaatggctgagaagcacttgaaaaaatgttcaacatccttaatcatcagggaaatgcaaatcaaaacaaccctgagattccacctcacaacaatcagaatggctaagataaaaaattcaggtgatagcagttgctggtaaggatgtggagaaagaggagcactcctccattgctggtgggattgcaagctggtacaaccactctggaaatcagtctggctgttcctcagaaaactggacatagtactaccagttgatccagcaatacatctcctgagcatatacccagaaggtgttccaactggtaataaggacacatgctccattatgttcatagcagccttatttgtaatagccagaagctggaaagaacccagatgcccctcaacagaggaatggatatagaaaatgaatgtggtacatttacacaatactactcagctattaaaaacaataaatttatgaaattctcgggcagatggatgtatctggaggatatcatcctgagtgaggtaacccaatcacaaaagaagtcacatgatatgcagtcactgataagtggatattagcccagaaacctagaatacccaagatacaacttccaaaacacaagaaaatcaagaagaccaacgcg

SEQ ID NO: 48 - DNA, 30808 bp, Mus musculus
cgcgttggtcttcttgattttcttgtgttttggaagttgtatcttgggtattctaggtttctgggctaatatccacttatcagtgactgcatatcatgtgacttcttttgtgattgggttacctcactcaggatgatatcctccagatacatccatctgcccgagaatttcataaatttattgtttttaatagctgagtagtattgtgtaaatgtaccacattcattttctatatccattcctctgttgaggggcatctgggttctttccagcttctggctattacaaataaggctgctatgaacataatggagcatgtgtccttattaccagttggaacaccttctgggtatatgctcaggagatgtattgctggatcaactggtagtactatgtccagttttctgaggaacagccagactgatttccagagtggttgtaccagcttgcaatcccaccagcaatggaggagtgctcctctttctccacatccttaccagcaactgctatcacctgaattttttatcttagccattctgattgttgtgaggtggaatctcagggttgttttgatttgcatttccctgatgattaaggatgttgaacattttttcaagtgcttctcagccattcagtattcctcagttgagaattctttgtttagccctgtaccccatttttaatggggttatttgaatttctggagttcagcttcttgagctctttgtatatattggatattatttccctatcagatttaggattggtaaaaatcctttcccaatctgttggtggcctttttgtcttattgacagtatcttttgccctacagaaagtttgcaattttatgaggtcccatttgtcgattcttgatcttaatgcacaggccattgctgttctgtttaggaacatttcccttgttcccatatcttcgagggttttccccactttctcctctataaatttcagtgtctctggttttacgtggagttctttgatccacttagactcgagctttggtagagggattctttacagaagtaactgatgcttgtgaatagcatcccttttccaccctcacatccctttggccaaaaatattttggacttggaattaccactgtcttcctttgtcctaattttcccactactcattcgaaagaaaatgaaaagaaaactctctttgtttttagagcaacacttttggaaccggatttaccagaatcccatggtatgtcttcttccatctctgacactatggctcatgagagtgtcccacattgccattactgtaaaaataggaaacgttctactgactacagcatatcctctgaatcctccaacaacagctggatcctgtcttatcttccaatctttcctgaaagaacaacttggcaaatccagggcaatattgtccccgattccccggaaaaggaattgcccgagtccaggaactgaagcacaccactgcctacctttcagctgacccacactgagaagtcagatcttttccagaattttgctgtccttcctcccttacaagctcatggctcttttattagctctaatttacaatccctagatctgttagtcaggagagagcagcacggacatatgtctcagaaggtttctactctgcagaaacaagtggtacctctgcctgtgaagaagtcatggaaaacactcaatcatctgatggatgtacaaggagttcctgaacaagagatcccccacactcagttacctacacccatccctcagagcaccaagccaagtaccaacagatcttcaggtgttccatcgattcatctacatgtgaacatcggagtcaattctgaagtaaataggacagaagccagaatgtcatggccacttacctccaacaagcagttagaatctgagaatgaccaccaaatcattagatactatcctttggttatatcaatggacaggccatcttccagacatgtagaagttaatgcaattcaggaagaaaccactttacagaaaaaggatccaaagcaagtgttagagctgaatatagaacagagggtcataggtcttccagaagaaaggatgaagtcacataaggcacaaggaactcatgcaaagctgacacccaagccaccatgttcagccacagacagaataaaggtcactccgatggcattgcttcaggttatggattcaatgggaataatcccagattcacattcagaggtaaccgaccctgtgaggaaagcaaaagataagactgacttatcacagccatcaaatgaagctcaaaaagtgagtgtacctcccaagtcatcaaatccagtaattgaatccataaatatagtaaatcctgagcatcaaacaagggaaccaaagattactaaccaatcagaaatgaatctgcatgaatacacagcaaacaccgaattgacattgcctgaagttgaagtctatgcaaatagatacaggactagagtcacaaggtaagttatctgtggatttagtacaacagtcttctctaggagtggtagatcctgaaaaggcaaaaccagagccagagcttcagagtttatcaccaaatgagttagttgaggggacacagattccaactgtgaaatctgaggatttgaatctgggccaagagccgccagttgtcaaatcgccattgatttcagggccacacctgcaaagtgtcagatttccaaagttatatcaagggcaacttcttcaaggggaaaatccagcaaattctatctcaggctccccacattataatttgaaatctgatgaagcaatattatatttcccagtacaagaaatcaggtcttctggtgctattccatggtcaaaggttctagaaccacatctacaacatgtgaaatctactgaagtaaatctaggaccatgtttgcaagatgtgagattttctgagtctgattattgttgttctgattattatgtgtcggaaggaatttcttttttgatccagtctatttggagttctgtaggcttcttgtatgttcatgggcatctttttctgtaggtatgggaagttttcttctatacttttgtcaaagatatttactgtccctttaagttgaaaatgtttatctcatctatgcctattctccataggtttggtcttctcattgtgtcctggatttcctggatgttttgagttaggatctgtttgcattttgcattttctttgattgttgtgcccatgttttctatggaatcttctgtacctgtgtttctctcttccatctcttgtattctgttgctgatgctcacatctatggttcctgatttctttcctagggtttctatctccaaagttgtctcactttgggttttctttattgtttctacttccctttttaggtcttggatggttttgttcaattccatcacctctttggttgtgttttcctgtaattctttaagggatttttgtgttttctctttaaggacttctacctgtttagcagtgttctcttgtatttctttaagtgagttattaatgccctttttaaggtcctctactagcattatgagatatgattttgaatccaaatcttgctttttgggtgtgttggggtatccaggactggctgaggtgggagtgctgggttctgataatgatgagcagtcttgatttctgttagtaagattcttacgtttgcctttcgccatctggtaatctctgatgttagttattatagttgtctctgcatggagcctgttcctcctgtgattttgttagcctctgtcagctatcctgggaatcctactctcctctgagtctctgtggtcagagtactctcttcaggcaatctctcctcttgcagggaaggtgcacagaggtctggcgttcagacctgcctccttgctgaagatgaaggcccaaaacagggcctgtcccagaagatgggtttcctctgcagtctgtgtgctcacctgcacagactggtctctgagggacccaagactcaagatggctccctcacctgctctggtggtcagagccctcctgggcggccacctctcctctggcgaagaaggtgcccgggatgtctgcagcccaaaacagggcttgtcccagaagcagtgtcgcttctgcagtctgctcgctcacctgcttgctcactctcctccgcagtctgcgagctgacctgtgcagacaggtctcagaaggacctgggagaccgacactttgttgagttactttgattctcagttctctttttcagttgtcctctctgttatgtaacttcaattaatttagtgtatcttgtgtcctaaaatggccattttttgctttttatttgtgatatctgccttccaagatgtctgcgttagttgattgtccattttaaagtattaactaaactcttgagtgtatgcacacagggcatgtatttctttgaactttataaagaactgttgtgttggatctcctggtatggatatgttttagatatttgtggtttttaaaatttccctcccctctagtggggagaaggacgagacaaaaatacccaaactcttccagtatcccacgtggcctacagtactctgaaatttgagtgagagatgaaaacagagatgtacatttaccttcttagcatcaattcagttgcttttgtttggcaacccctttgtttcttcccactctggaggagatggcaagggctggcagcaaaaggtgaatgtgtacatgttttctactttggcaagttggatctctcattggcctatagctatatgttactatttgtaaagtaccattttttttgtttttgtttttgtttttgtttttgtttttttccaagacagggtttctctgtgtagccctggctgtcctagaactcacttttgtagaccaggctggcctcgaactcagaaatccacctgcctctgcctcccaagtgctgggattaaaggcgtgtgcgaccacgcccaatatttggcagtaccaaatattttgtaaactgtaaaatcacactagaaaggtagatgaggctcctaataaaaacaggattagaaaaacactattcaagcttgtaattttcactgctacatcaaaaaataaataaaatgaatgtatgaatttgtagacagagctcactgaataatccaaggtgacctgaaatctgtaaccaaaacttgtctgaaactttcagtcctccattctcagcctcttgagttctggagtttcactgtgtgtgccacatggctgaacctggctgaacaaaaataatttcaactaaaaaatactagtactgggctggagaaatggctcagcaattaagagcactgactgctcttccagaggtccttagttcaattctcagcaaccacatggtggctcaccaccatctgtaatgggatccaatgccctcttttggtgtgtctgaagacagctacagtgtactcatatacataaaataagttttaaaaaatactagtacttactatcagtgaactaatgaaatttgacattaaaacttaataccatttatattatcatccaggaaaacaataaagcaggtataaaactatcaaaagcatatgttaaaatctatgtaacacaaaccaaaaacctgaatgaaagctattaagaaagaactaaagaaatggaaagtcattccattttcataaatagaatgactccataatatcagcttatcactttcatctatatattcaataaaattccaatctaaatttaagaaagtaattttatggatgttgacaaactaattctagagttttatttgaaaagacaaaaaatataacctataatactgaagatgactagtcagaagcctgatatcttagtgtctgtgacacttttaaccaatgacttagtggtagctgtcccacactaggcattaagaatttttttttatttgcattcaagccaattcttttctttctttttatcttattatttatttatttacattccaaccattgccccccaggatcccctcccacagtttctcatcccattcttcctccccttgccctgaaagggtgctcccccttaccagacctccctcttccctggggtctcaagtctcttgaggattaggtgcaccttctcccactgaagccagaccagacagtcctctgctacatatgtgcctgtggcctcagaccagcccgtgtatgctgcctcattggtggctcagtctctgggagctccttggggtccgggttagttgagacttctgatcttcctatagggccgcccttcccttcagcttcttcaatccttccaaaattcaaccatagtggtccccaacttcagtccaattattgggtgtaagtaagtatctgcttctgtctcagtcaaaaccaaagacccaaaaaataaagagaacttcaggccaattttacttatgagtattgatgcaaaaatactcaataaaattctcataaattgaatccaagaacacatcaaaaccatcattcactaaaatcagaacaatcactctctccctatttattcaatatagtactcaaagttctagctagagcacttagacaacaaaaggagatcaaagggatacaaattggaaaggaagaaatcaaactatcactatttgcagatgatatgatagcatactgcagtgaccccaaaaactccaccgagaactcctagagcttattaacaacttcagcaaggtggtcgcatataaaatttactcaaacaaatcagtagtcttcctatactcaaagggtaaacaggctgaaaaagaaattaggaaaacgacaccctttacaatagtcagaaataatataaaatatcttggtgtgactctaaccaagcaagtgacaaatctgtatgacaagaacttcaagtctctgaagaaagaagttaagaagacctcagaagatggaaagatctcccatgctcatggatcagcaggattaacatagtaaaaatgaccatcttaccaaaagcaatctacagattcaatgcaatcctcatcaaaattccaactcaattcttcacagacatggaaagagcaattctcaacttcataattaaaaacaaaaaaaatccaggatagccaaaacaattctcaacaacaaagaacttctggggaaaatcaccatccctgacctcaagctgtacagtgataaaaactgttttgtacagagatagacaatggaatagaatcaaagacccagacataaacccacacacctatgtacacttaatctttgacaaagaagccaaaatcatgcagtggaaaaaagaaaacatcttcaataaatggtgctggtataactatgtatgtatttatgtatgtatgtatgtatgtatgtatgtatgtatgcagaacaatgaaaatagacccatatttatcactttgcacaaagttcaagtctaagtggatcaaggacctcaacataaaaccagatacattgaatctaatagaagagaaagtgggaaggagctttgaactcattggcacaggggaaattttcttgatcgtaaggaacaccaatggctcaggctctaagatcaacaactgacaaataggacctcatgaaaccaaaaagcttctgtaaaacaaaagacaccatcaataggataaattggcaacctacagattgggggaaaaaactttactaaccttacatccgaaagagtgctaatatctaaaatatataaagagctcaagaagttaacctccaaaaaacaaaacaaataacccaatttaaaaatgggatacaactgcctggtctggcttcagtgggagaacaggtacccaaccttagagacttgaggcctctgggagtggggaggcctagcaggggttctagagaacatccccttgaagacaggggggaagaggaatgggatgaagaactgtgggagagcagactggaaagggggcagtgactggactgtaaaaaatatataataagcagtgcgtggtggcacacgcctttaatcccagcacttgggaggcagaggcaggcagatttgaggccagcctggtctacaaagtgagttccaggacagccagggctatacagagaaaccctgtctcaaatatatatatatataataaaaaattctttaaaacatggggtacagagttaaacagagaattcataacagaaggatatcagaagccaagaagcacttaaagaaatgttcaacatccttattcatcagggaaatgcaaatcaaaactaccctgagatttcacctttcatcaatcagaatggctaagataaaaaactcaggagacagcagatgctggtgaagatgtggagaaagaggaacactcctccattgctggtgggattgcaaactggtacaaccactctggaaatcaatctggaggttcctcagagaactggacatagtactactaggagacccagctataccactcttgggcatatacccaaaagatgccccaccatatcacaaggacacgtactccactattctcatagcagccttatttgtaatagccagaaacaaatctggaaacaactcagatgtctcttgccacacccactccagtgaagtctgcgtggcaagcccaaaagcttggacacagtcctgaggcaaaaagtttcacagaaacttgtctcctggagagtctctggtgccccataaccagattttttttttttatttttatttttttttttttaaatcttttttttttttttttttttaaagatttatttatttattatatgtaagtacactgtagctgtcttcagacgcaccagaagagggcatcagatctcattacgggtggttgtgagccaccatgtggttgctgggatttgaacttcggaccttcggaagagcagtcgggtgctcttacccactgagccatctcaccagccccccccataaccagatttgtccctgagttagtgtggagggttttgcatgctttcttgcagtattttactggataagagctaaaaatctcagggcaagttctacaaagtaagcttagaattacagccggtcactctcatatgcaggaatttacaatggcctaggaagaaggagggatgtggtttaaggtggaactacagtattgcattattcataagcaagagctgaacccccttggtacaagctttcacaaggctcagtggaatagcataaattgtaactagggtgtgaaatcctcacctggcttcctaatggctgactttagaaagggctgccttttatctcagttgcaaccactgcctggttcctgtcagtctttatgaatttttctgttttgtgtcagataacttcaatgtaccttggcttatgtgtcacataacttatttgttttcttctgtaatataagtctgatgctcgctttgagaaattatattcagatacagcactctctgtgtgtcagtgtctgtcatttttttgccatctccttgcccacatgagtactgaaactctggtttcttgtgggttgagggaccgactaagtccagtccacggcagtccctcaaccaaagaatagttacagaaaatgtggttcatttacacaatggaatattattaagctattaaaaatgaggatatcacaaattttacaggcaaatggatggaagtagaaaatatcatcctaagtgaggtaacccagacccaaaaggacatgcatggtatatactcactgataaatagatattagccaagaagtacagaatatgtaggatacaacccacagaccataagaagtgtaacaagcagaaagacccaagtggggatgctttaatcccacttagatatggaataaaataatcatgagaggcagagggaagaagggacctgggtgagagaggggagtgaaaggggaaagggaacaagattagattggggttggacaggagagaagaccaaagggccaggagaatgaatggaaatatgcagccttggatggtgaggggtaggggaaccctctagaaagtaccagagacccaggaggtgagagactctcaggactcaatggggggggggtgaccttagccaatatgctcaacaatggggagagggaactcagagagtccacctccagtagatagacaggaccacaagtagagggactggattagtaacccatagtcaaaatttctgacccaaaattgttcctgtctaaaagaactgcagggacaaaaatggagaagaaactgaaggaaagttggtccaatgactagcccatattgggatccatctcatgacagggggctggagggtgttcaaggcctgacactattactgatgctatgatgtgcttacagacaagagtgtaaaatggctgtcctcagacccaatccgaagctgactgagacataaatagacacttaaacccaatcattggactgaagttggaaacccctatggttgaattatgggaaggattgaagaagctgaagggaagggctaccccataggaagatcagaagtctcaactaacctggaccccagggaactcccagagactgagccaccaatgaggcagcatacacgggctggtctgagggccacaggcacatatgtagcagaggactgtctggtctggcttcagtgggagaaggtgcacctaatcctcaagagacttgagaccccagggaagagggaggtctggtaggggggagcaccctctcggaggcaaggggaaagaggaatgggatgaggaactgtgggaggggatcctgggggcaatggctggaatgtacataaaataataataaaaagaagaagaagaagaagaagaagaagaagaagaagaagaagaagaagaagaagaagaagaagaagaagaagaagaagaagaagaagaagaagaagaagaaaaagagagagagagagagagagagagagagagagagagagagagagagagagagagagagagagagagaattggcaccaaattctcagttttgtacagaaataggaagaaccacattaagttatagacatcatctcttcatcatcatcataatcaccatacacacacacatacacacccatgtgtgcatgtgcacatacatgcacatatatggacatacatatatgaaattgggataaagttgagacaggctttccccctacagtatagtctgggctaaaacccaaaatactcttgtatctgccccttatttagaaatccttaaaatgtttcatttccattcttttctactttttttaaaagacaataacacatcactgtaatgtcacccaaatgctctgtatttaccaagaactgacttttgttatactgtgattaactattctcttttcattcagcaaatacttataggggtctcctttgttcaggctccttacctatatatagcacgaaaaggttaaaacactagagtctgctttcttgagggacccatatgctagttggatagaaagctccttcagttttaaggtatgatatataatggcagacactaataggaggtatgcagtgcatggagactccagacgagggaggcagaacttctggatattattttggcgcttttatcttttggagctatatcttatctaagtagtcccatggtctcagaatctgtgacatcaactctaagtgtataattcatattaaaatgttttgagatttttctatatctgtcttcaaattacaactaaaagttaaaaatggacctagagggaggtagacttgaattcaaatcagagattatgttttatgtttccaaaaggtggcttagttagatcccttactctctcatgtccagaaaagaatgtacaagacctgaaattaactaatgtggtatatgcaatgctttctcatggcatctctcactcaccatctgcagctttcacttcttatttaactttacatgtcataaaaagtgcttaattattgatttgggggaggatgtttggatgtaacttaggaccttgctcatgttgggtaagaactttaccagctgagatgcgtctttcagtcactggtttttaaatataatataatttatttgtttgaagacagtctaaacattataaaaatacatcacaaagatttctttaaaaacatatttaaattagcaattcattgaggtaaacttatacattccaagaaaccatctggctaggtaacagaatatttatatcaaatagatttttaggttatcatttcaaaactataacatataacatttcaagtgacacttcataaaaataataaatatcaatcataaattaacttaaagtttacttatttaaattatcaataaattaaaaataattaaaatagtgtcccaacattcatattgtcagttcttcgtagagaacaacataagtcagatacctgacaacaggatatattttctgaccacagtgaggaatgtccacaaactgatatgcttaggcataacgcactaggtttgccgagtagatctcaaagtgacttttagaaattcttcaagtgatttcaagatgaattggatggtcttggtccttagccactccttctgtgactccagcttatctgttaggagagcattggaaattggggtaggaaggactattttatgtaaatcttttacctaaaggaggaaaaaacaaagactggttaaatattgcacattttttttttcttgtggcgtgttctgggctgtgggaagaagttctaatttagaatgaatgagacgagctaagtccatctgctttgactcacccaagccaggggagatgcttttgttccaagcttactcgagagagacccatgcctaacaactccattctttttcaaggtgattattattagttttttaatagcaacagaattctaaccttactgttctgtctgccactagagagtaagcgtccagaggtcagcaccaccatcttatttgtctgttatccaagcatccatgctaacatactgtattctactggaaaacagaagctcccatcagtaaaggtggcacagaggaatctaaaacaaatgtgttccttcgtggtttccattcagactctgttgagagtctcttagtgtggtagcatgaagaagtctggaaacacccttccatgggcccactggcatggggaagactaactggaaggcttgccccactacttaggagcctgaatactatatagcagggtcataaacaagcagctgtttacaaaaatgaatcttagttcccttcctagacctcctaagtaagaccctgctggaacaagaccctaagtggttcctgtgcacattaaattgggaaactctctggtttaaggcaagaaactacaagtggcaaaagcagccttagcaagagggtttcattccaggcccttcttattgcatctggctttgttcgcccacactctgagtcattaatcctccatatctaccattcttctggctaatggtagccagaagcccttgatcccttccttccctgacattttagcttttggctacttctctgcattagaactctggttacaaaaatgtcacttgccaaggattaaatattaaagtcacttttgtctctgtgctctcataatgggtgactatgtatggctgtcatagttttcatacctcttacgcaattagtaacattctattaatacagtttaaagcaggtattgatgttctttgcaaaagagaacctcaaacaaaaccccaaagtaaaacaaagcaaggccttataatcaagaactgttgttcagactctctcccttctgagcagctgtctggaaaaagtgccgctaccctgaggtgccgggtgtcctctttcccacactgcatgagagatggggaagcactcacctcttggttgaagatatgaattagagtttctgtatctctctgaaggactctggctttgtctttcttgttatcttttaagttgttcttcatgtactccaggtagctatggtactccagaagaccagaggaaattttcaataggcaaatttcctataagtaaaatggaaaaggaagtcagttctttctaggaatagattcaatttgagaataagattcctgctgttcaaaaaaaaaaaaaaaaaaaaactaggatagcaaaaactattctcaacaataaaagaacctctggtggactcaccatgcctgacctcaagctgtactacagagcaattgtgataaaaaaaactgcatggtattgatacagcaacagacaggtagatcaatggaacacaattgaagacacagaaatgaacccacacacttatggtcacttgatctttgacaagggagctaaaaccatccagtgggaaaaagagagcattttcaacaattggtgcgggctcaactggtggttatcatgtagaagagtgtgaattgatccattctttttttttttttttaaataatctagttttatttatttattacatgtaagtacactgtagctgtcttcagacacaccagaaaaggacatcagatcttattatagatggttatgaaccaccatgtggttgctgggatttgaactcaggacttctgaaagagcagtcagtgctcttaaccactgagccatctctccagcccgaattgatccattcttatctccttgtacaaagctcaagtctaagtggatcaaagaactccacataaaaccagagacactgaaatttatagaggagaaagtgggaaaaaaaccctcgtagatatgggaacaggggaaaaattcctgaacagaacagcaatggcttgtacagtaaaatcgagaatcgacaaatgggacctcataaaattgcaaagcttctgtaagggaaaagacactgtcaataagacaaaaaggccaccaacagattgggaaaggatttttaccaatcctaaatctgataggggactaatatccaatatatacaaagagctcaagaagctgaactccagaaattcaaataaccccattaaaaatggggtacaaagctaaacaaagaattctcaactgaggaatactgaatggctgagaagcacttgaaaaaatgttcaacatccttaatcatcagggaaatgcaaatcaaaacaaccctgagattccacctcacaccagtcagaatggctaagatcaaaaattcaggtgacagcagatgctggtaaggatgtggagaaagaggaacactcctccattgctgttgggattgcaagcttgtataaccactctggaaatcagtctggctgttcctcaaaaaattagacatagtactaccggaagatccagcaatacctcttctgggcatatacgcagaagatgttccaactggtaataaggacatatgctccactatgttcatagcagccttattcataatagccagaagctggaaagaacccagatgtccctcaacagaggaatggatacagaaaatgtggtacatttacaaatggagtactattcagctattaaaaacaatggatttatgaaattcttggtcaaatggatgtatctggagagtatgatccttagtgaggtaacccaatcacaaaagaagtcacttgatatgcactcactgataagtggatattagcccagaaacttagaatacccaaggtacaatttccaaaacacaagaaaatcaagaagaaggaagaccaacatgtggatacttcattcctccttagaatggggaacaaaatacccatggaaggagttacagagacaaagtttggagctaagacaaaaggatggaagatccagagactaccccacctagggatccatcccataatcagccaccaaacccagacagtattgcatataccagcaagattttgctgaaaggaccctgatatagctgtctcgtgtgaggctaggccaatgcctggcaaaaagtggatgctcacagtcttctattggatggaacacagggcccccaatggaggagctagagaaagtacccaaggagctgaaggggtctgcaaccctataggtggaacaacaatatgaactaaccagtacccccagagctcatatctctagctgcatatgtagcagaagatggcctagtcagccatcattgggaatagaggccccttggtcttgcaaactttatatgccccagtacaggggaatgccagggccaagaagtgggagttggtgggtaagggagcggggaggggggggagggtataggggactgtggggatagcatttgaaatgtaaatgaagaaaatatctaataaaaaattgaaaaaaagattcctgctgttcagtatcttctacagaattagacaacaggcagcatcagctgacctcctgaattatctggacaagtagagagaggcaccacttaatatccccccaccccctaccccagagtgtggcagtgggaatccacttctgaccctcactccttcccttctatcctgcagtgcccttcctgtactcttgttcttgtctgacttgtcctgagacctgatgtagactatctcaccggctggaaggagaggggtgtgaagagtgttctcagtagggagtgtaggcctggatccttccaggggcagccagagaagagatggctcatgaactagctaaacttgctatgacttctaacatttaacagtggtgaagaatcccagcatagtgggcctttacctgtttaaataaactgctttttaattaaatctgtaagttactttcctcatgacgtttacataacatgttttatatctactcttccacttttttagacaaaaaaaatgttttttttttaatcatctaacacctcaaagccaagatgagaatagagactttaaacatttagctcctgatggacatagattgagtgaacatttatagcactggttggtaaactttccctcaccctagcagctgctgaggtacctctcaatctccttttgtattcaagctactgcaggccagttacatccaagtggtattggatgtatccccccatctttgttgcctgactgggactgtacaaatgcaggtatcacgtgcaagagagaaccttgaagaattgttgaaagtaaacgtgacaagtttctacctgattatatccagtttggtagcatccatcatttctttgtatctctggaagtttcagattgttttctgcaagtgcatcatcgttgttcatacaatcagaattgccattgcacaactgcaaaagattaccagagcaatcacttaaacacctcttacaacaagcaccactagagggccaagtcatgctctttcatagccaggacacagaaaagggaagctataccttcttagaaccctactaagcagcccaataaataaaaatgcacccttaggctcagtcccttggctttaagcttgttactctcctaagtatttcctatgtttcaataaagaattattgatgtccctcttatacatttgtctcaaggattcaacgataaaaactgcccagcatagagtaggaacttggtaaaggacagaaattttgatgatatcttggggcaaataaatttaagtcacagaatattccatctggaagggtctgtgccattatctgtaactccataattatgcagataaagagtactaaatagttgaggattttcccaagattacaaagttggttctacacacccagacctaggctattaatcttgtttgtgattttttttttcctttctgtcaagcagagtcaaaatacttttcatttaaagatgggagatattttaatctaggtagggttggttgggttttttttttcttgtttgtttgtttgtttgttgttgttgtttttttttttttttttttttttttgagaaaggatctctcaatgtagtcttggatatcctggaactcaatatgtagaccaagctggcctctaactcacagagatcttcctgcgtgtgcctcccaagtgctgggaggcatccaccaccatgcccagcctaatctaggttgtgtgtgtgtgtgtgtgtgtgtgtgtgtgttagcactttattgggctctatacaatatgcatcttatctgggctgaccctagagcatcctgatttcacacacacagaacttactacattcagccaaaaagcactttctggtccttgtagacttcaagggataaatgaaggcaaagagataaggaaaaaggaataatgagggaaaaggaatccccacctaagaagcaatagctaaattggaacagagaatggcccactgtgaattttctagaaatgcagtcacattctgtatcttccagacaggaaaggaaccccttcccaacctccactcaaaaccagcaaagaggtgagaaagagagaacacagtctagtctgacctttagcttcaaatcctaagggccctagatcccagcagagaatttctaattcaagagcaaagagaatgaatggacgcccacactgggtcttcatcagtttcacagcctacccacctcttttctcatttccacgatttcccagagaacatgtgtaattaagcctccgacttgtgaagtggtatagacaggtctgttgggagtggtatcctctgtgaagtctcctctccggacttgtgaagtagggaaggccgtggttgtcaccagcatcagtcccaagaaggcaactggatggaagtctcctgcgtggagaaaagggaaaaccggcaagtgagcagatagcacagttgggcgcctgctgctagctgatggctgctggccaacccacaatgctggctctctgcctcacactcctctctcacagtctcaatagctccgccagagggcaaggaactgccttcacttacttgcagagaggaacttcatagcggtttctggaattgactatcgttcttggtgggctccagagcagaatgagctacagacatccccagtctcatatttattaggagtcaactctctaattttgagactcatgggaaaatcccacatttgataaaaatctttgttggagggtgggggtggggccagagtgggtggggctgattggaaaccttattaagattgcacaatgtgacgtcgtttagcatcgaaagaatcacaactaggaaggggaaagtgtgcttaagtcatccttgaggctagccctaagaagcatgagcactcttcttttttttctttaaaagtgactcagcacttgagcatgtcttgatgggaaagaaaactgaaattcacaatgttttataaggagaaagagaagctaaagctgatgttatttaaacgcaggcacgcgcgcatgacagacgacacacacatacacacacacacacacacacacacacacacacacacacacacacacatgaataagaggctaggattcttttgtatgtctgtaaggatctacagatgttctgacctgagttttttcagatcatacaaagacacacactccctctcccacccccagcacccaacctggacaacagacagtaatgttgcatattgcttgtttttcctgtgtcttgtcaggaccagttgtttctaatggtttgttcacctccaaattttgtgcagttgtttccaggagttgccaggtgggtaaagtgggtgaagtacagaaatatcttctgtctgttgtcaagcaatcttggcttccaagtccaagcctattctctgcattctccccagtggtctcttggctatcttcttagttaagacctttagtctctgtgagagttgcccttatctgttagtgctgatcccactgctgccaggacaccccaaaacatttccaggtcatgcaaggaggcttgaaggtctgttgcagtcctcatgttgttgaagtttctttgattcatggtatatggaagataaagatatcgaagaaggacctcattgtatcttagctagcttgtgtttgaagctcccttctactggatgacaggatttgaatctgaaggtggtacgtctcactctgaataacccctccaatgctcaagtcttctaggctgggtcaaacttaaacagacttcttccctttggttagtttctttttcagactagttcctggttttctgtccacctgtctccagatatctagctagcattcagaatgattccaggctgaaagtaggctctgtacataaaatccaaaaccatttacaaaacacactctcaggatcacaatcagcttcttcactctgcagattgccttaagattcttgttttcttatgctcccatgtttaatagttcaagaattatatatcactagcatagtttctcctagaattcaatgtgaagaaaaaaattacactaaaataaagagaacagctttatatctagcagattaatttatattgagaatgcaaaaggagaatataagtacactctaaagaatgtaacccagtgtaaacacacaggcgattagagtagattaaaatgaaaagccggttgattcttgtgaagaaatcagaaggggaataaactaggaagaaagttaaaacatgggtggacttagtgtacatactaggtcagcctattgaaagaagtgagtccaccattctttcaccgtgtgaagccctggtcttcacaaagggactaggggattttaggtgaaaatgaaaatggggagaggaagcaggatggttttacttttagtgcccttgagccttaaaaaggcagctgaaacagcctggagctcagtctgtgtccagcaatgaaggaagccatttcccctattccctgccgtgtgctttctcaggcctctgttagtacagagtttcttttctccgcttaacaatttttttaaattactgaataaacttaagattgttacacttactacaacattcagatttctgtttttagttttttaaaaaaggtgctttttaagtcgggagcatacatccatgataaaaatgtttaaacaagacatcagaagaatggtcccacaggagatgcctaaaccccggtagttttagtggaactcttgtcagcctcatctggaagaggctttctcagctcatatatttatacatatacatttcatacataaatgtgtgtaaaaatacatatttatacatagaggtacacactgtatgttaatggtctggatgctgtctatctagctttccaagggtacacgtggagaccatagcctttgagtaacaatttgaattagaagcccaactccattgctagctgtttgacaatggctaagttagctcaagatctgtgttcttgtttatttactctttaacatgagaataataatagatcatcatacggagctgccatgaagatgactaagaaagtataagctccaactctataacttccgattgcatttactgctctttgaagaggttgtgggttcagtttctacatggtggttttaaaccttctgtgactcttgttcctggggttctgatgccctcttatagcctcagttggcactgaatatacagaatgacactgcaccttcacacgtgcagaaaaaaaaccatgctcaaactacgtcccttacttagtaattacccagctgtgctttactcctagactctccccgaagccttctgttaagtgtttttatgtgagaagttacagcctacaacataacgctatccttcaagtttctgagtatgattctcaggcataaatggccttgacaaccccagagcttgagcttctactagtcagatattcaagggttggaaggtagggtgattctgtgttgtccctttgtatgccaccagcatagatctttgttagtaccactgcctttgattggcatttgattatgggagaaaaagactcttcctaaaccaaaatattagcacagtaactctaaactctgtttctaccatcacagattcttttctctgtatcttgatgggtttcccatttgaaaaactcctcgtgtgtgtgtgtgtgtgtgtgtgtgtgtgtgtgtgtacgtacacttttttctgcagttttaagatcacagcaaaacttgaggcacacatttccttagctgcacttacttaaccccaaatctcattcatattttagtatgttttaataaacaagaaaggctagtatacattgtcattactaactaaaaatttgaggacttcagcattgcaagaagttgcattcacaacttctcgacccagcctagattttccaacctgaaacagggctacacctagatctcctgatgctaagctagatgcaaatcaagagatcagggatagaatgtgtgtatcacagttctcttcttttgtatggggctgattgtatccctctgaattactactcacatgcacttttctatgtgctgatggattccagagtttattagtacatttcaggtaagtggaagaaggacatttacctctctagaagagaaatgctttccacactctcaggcttgggtgatgtgctctttggctggggttggagatgactaggtctgcaatttaactaaaaagcgtatctcaaagagaaaagagaagttactggtactagagaacttgcagttgattttagaacgtagtttcatttgtcaccaaggcagaagatgtttgcaaagtgaaacaatggttaatttaacagcttcttctgggagagaggctctagaaaatgtcttgtagtgagaaaacgtattgttgttatttggagagcgactgttagggagaagggtgctgtgtttatttggaaggcactggctaattttaaaggagagccaggctaattgccctaacctcttgatagctgccagacagttcagtttcagttctggccttacagcctcagtgttgctcagtgtagtacctaacaacttcttgacccagttttagatttttccaacctgcaacagggctaaacctagatcttctatgctaagtttaattcaaatctgccctatgatttcatctcttctttgctcttgttattttgctatgcatggagatatcttatccctagaaaactagaaactcccaggcattttaggagtggctctatggatagcaaggaacagtctccctgcctaaggacctgctacacatttctgtcttatcttaatgagagtgctctgatccctaagtgtcgataagatggcctctccgagctggttggtgataagacatcgagttgatatcctgaactctccccggtccgggaagatcccttgggctgactttctgtgcttgcctctctctgtggggttgattttcagtggctgctacttgtgcttcaccattaggaaacctcagctaagagaaaccagctcatttattctggtaagtcacttaaaccactttggcttctccaaagatctcagttctctcggttcagagccatgagcagaaactaagcatgcaaagtatcaattttcccttaaaattaaggtagtaggaactagttgaaagcatcacatgttgtgtcaaaaccaggggattcttttggcctgactgtgatgtattttacctcccttcctttttatcagttatttgctaatgtcttagttcctctgaataaagtctctgctgtagtcttgcaagctggattcatgaaggtaggaaaggcctaatcttcatattgaaccatttccacaaaaaactttggatgtgtgaaacactctccacatctgagacactaggtctagttgcttcatcgcagatctacctggattgatttaaagtgttacagaagaattcagatcctggtaagcaagttaaggccaaaaaaaaaatttacaggtgatacattgaaattgctgaatattctctctctctctctctctcctctctctctctctctctctctctctctctctctctctctctctctctctctctctctttctctcccatccctcccgtgtatgtgtgtgtgtgtgtgacttgctctgtgtatatgtgatatgtggtggggtagggtggtacagcaggggagagagagattccttgacccacagacctactattgtcacatctctacaatgctgtcccttctgtgctggataaccttgaagtattcaaagagccagggctatctgtctgctgtcactattctgacagggcctgtgactcctccatattggtgaaggtctgggctcttgtgggatgacttattgagattccgtatccaggaaaccagatttcttccatgtaggtaaaattcaggaactcaaggtagtgagtgaccagagagcaggcctgactttcccactagtcagctttacaagggatcacagtgcctggaaatggcaaaagatctgtttggaggtttggtgcctaagcaacagctgctggctgcatcagattctctcatggctctgtaaatacaggataaatattcctctatgactagtttattcattgcagctctagggaagctactctgggacccaggtatgtagtcttgggcaagttgtatttagaaggagactcaggcccaggtattatgtagctgttcttttgtctagatttgtgaagatctgaatagccttactgaatggaatgcagatttcagacagaatgaggttgcaaatcttttggctgaatggagagtttccctaaattgtccttgtttgttcgcttttctttctacattactaaatccgtgggttgtattttagtagtacaactgttttcagattcaaacattgagatgatgactaacaggagggtgtcagagcacagtgttttcctacctaagccctccacatattacactttccaatttctttccctgctccaacagtctgtccacactgtgtgattctacagctctccactcaacaccccaaaatctactcatcatgggctgttgcctgatatgtcctcagaattgagaaataactcttgaatgttatcttgaaagtctgatgccatcatcttgctcatacccaaagaaaattcagtaaactaatttcagctgtttaggatgctttccatttttacatgtccaggatcttggtggcctcaggcaaaataaacaaattcaagaagttagagtctgtgtgaaaacatgccagtgcaataaaatagcacatttcttagtaattattgttggtggttcttgttctttcagattgttagtagtgattctcagctttctgaaaagttagaattacaaattcatgccaccagacctggcttggcttttctttctttcttgtatttctctgcatatacaacacagagtaactctctgaatataaactagttggagttcagaagggaagcatcaagtgaagtatatagatgctcactgttcacaaagcacagggaatgtattcatagcttagtattgataatacacattgaaaataatcactgatttcccaaaggttaacttattgtttgttcatgcagtaatggcatctctaaattattaagttatgctggttgtttgacaccatgcacattttgcagcttgacttgatatttgcttttcagctggtctggaacacagactagtcctgattggactcgcagtgggcattagtagctaattggtattcagggatggcaagatgtatagatcattttcatggacaaaggctgaccttatcactcttcttttcatatgtcacattacttcatcttgaaattcattactggggcctgtttcacaaggtgacaaatggattattgataaaaggatattaccattgaagtgtttctctctttttacttaagatctggttgtatcttcccaggggactaagttacctagtatgatagtcttgcttgtgcaagagaaactgcgtatcttgatagtaagaactatcacaagcaggcagcaaggagctgaccgtgggggaggcggggctgatgtggataaggagagaatccacaacttctcggaactcagatgagatgctgaaatagtaaacactaagtatttcagcaaatactaagatttaaaatcctttaaaagatacagttatatgtaccagttgtgatagtttgatatgctttctgaagtcacgagaagacctatcttttgactctattgtgttctttcttttttttaaatgaattttttaattaggtatttttcttcatttacatttccaatgctatcccaaaagtccccccatatcctgccccccaagcccctcccccctcccacttcttggccctggcgttcccctgtactgaggcatataaagtttgcaagaccgatgggcctttctttccaatgatggccgactagaccatcttctgatacatatgcagctagagacacgagctgggagtggggtggtggggtggtggtggtggtaactggttagttcatattgttgttccacctatagagttgcagacccctttagctccttgggtactttctctagctcctccattgggggccctgtgatccatccaatagttgactgtgagcttccacttctgtgtttgctaggccacggcatagcctctcacaaaagacagctatacctgggtcctttcatcaaaatcttgctagtgtatgcaatggtgtcaccttttggaagctgattatgggatggatccccaggtatggcagtctctagatggtccatcctttcgtctcagctccaaactttgtctctgtaactccttccatgggtgttttgttcccaattctaagaagaggcaaagtgtccacattttggtcttcgttcttcttgagtttcatgtgttttgcagattgtatcttgtatcttgggtattctaagtttctgggctaatatccacttatcagtgagtacatatcatgtgagttcttttgtgattgggttacctcactctttctaaacttctttgagtaaataaagattgccagataagtcaaacaaatatttattgaatgccaattactaggaatgccctttttcttgtctaagttatttaagaattttataaacaatattaaacctcaaatgaaaaacgaagctaccatgaccacagaaacccaaatgggggatttgttaaacttatagcagattgtttcttcttacaagagtaaaccttgctaaatggtggcaacacaattttattaatggagaccagtttggaaaattatttatcaatgttgtaggaacactcagttccagaaagataatattattatgttccatgacagactgaaggtagtagtatagcagcaggagctgagcacaagtgggttctcctggagagaacagaaccaaaaggggctaaaagaaggaaacaacaacccatttttgtctggaattcatcaggcattaactcaagattagtagaagatctaattccattcctacatataaaaattcctttactcaaggagctagaccttgcatctcttcccatctttcatggttgatagtaaatgtaaatgcttattgaaaactactatcatgagtttcaaattttttataaaccatgaactgtgtgattttattttctatgagctatgagactataatgtgcaatgtagaaaataaaatgtcccttctacctcatagatggaagccagagagatgacccaagcttctttctcatcttcagcaccgcatctatcaccacagcaagctgggccctcaagcatccaccaggtagatgtctgcctaagtgcaatgctggtctcatataacagacaggtgcaagccaaactaagttagaagggtaaggatgtgctcaagacaaaaagctcattctgcagattgaaatgcccttgggttatctttaagaagaactgaatcatttaatgtcacttcaaagatgaggatataaacttctttttttttttcattttaaaaccggatttatttctttctattttttgtttttgtgtagtgcctgcacatatgtatttgtgccatatgcatgactggtgcccaaggaagtcagaaaaggggctggatcctccagaactgaagttatgggtattgtaaagcactacgtatgtgctgcaaacagaaagagcaagtgttcaatctccagcccctactttttttttaatatttttattaggtatttttctcatttacatttccaatgctaccccaaaagtcccccataccctcccccctactcccctacccacccactcccactttttggccctggcattcccctgtactggggcatataaagtttgcaagtccaatgggcctctctttccagtgatggccaactaggccatcttttgatacatatgcagctagagtcaagagctccagggtactggttagttcataatgttgttccacctatagggttgcagatctctttagctccttggatactttctctagctcctccattgggggccctgtgatccatccaatagctgactgtgagcatccacttctgtgtttgctaggccccggcatagtctcacaagagaaagctatatctgggtccttacagcaaaatcttgctagtgtgtgcaatggtgtcagcgtttggaagctgattatgggatggatccccggatatggcagtctctagatggtccatccttttgtcacagctccaaactttgtctctgtaactccttccatgggtgttttgttcccaattctaagaaggggcaaagtgtccacactttggtcttcgttcttcttgagtttcatgcgtttagcaaattgtatcttatatcttgtgtatcctaagtttctgggctaatatccacttatcagtgagtacatattgtgtgtgagttcctttgtgattgggttacctcactcaggatgatgccctccaggtccatccatttgcctaggaatttcataaattcattctttttaatagctgagtagtactccattgtgtaaatgtaccacattttctgtatccattcctctgttgagggacatctgggttctttccagcttctggctattataaataaggctgctatgaacatagtggaacatgtgtccttcttaccggttgggacatcttctggatatatgcccaggagaggtattgcgggatcctctggtagtactatgtccaattttctgaggaaccaccaggctgctttccaaagtggttgtaccagcttgcaatcccaccaacaatggaggagtgttcctctttctccacatcctagccagcatctgctgtcacctgaatttttgatcttagccattctgactggtgtgaagtgaaatctcagggttgttttgatttgcatttccctgatgattaagaatgtctaagaggtttagtaacttacctaagatcaatgtttgggtgggtcaggaataagattgtcagataaaagctgttactcatataaacttcagatacatacaaataaacttctagtatttatgtaatattgtaatatatatatatcaaatgatcatgctaaaacatgttctttgttcactgaaattccagtggatattctgtattattattaaaagcaataactttctttggcaggaccaaggacattgaaaactaggtggcagtaaaaagaaagaagagccaaggaagatggatcaaacagggaatagtgctatgaaatagtgggaatagtgttatctgagggggcagaataaagatcccaggattgaagtcaggaagcagggtttggaggatgttgcagtcatattcccctgagaggatagaacgcagtgggcacacccactagagctggctggttcaattaggctcaagagaaaactgtgcttatcacttcccaactctgtatccagttactcctggtggcaacctagaattagacaagatgaaaatatttataatgtaactgttggcaggagctacaaatcagacccctcctcctacttccctcccttcctcagtgagttgttaaatatctccccatacgtcagctggccaaggaaatgcaggggtattttgacattacaatcaattcaacatagagattagttattatgtgaatactgtttgggagcataagaaaaagacacagcaaacatattaaagaatgtttgattaaagattcttgtggaggttggttgaggtggctcattaagtaaaggcattctgatgaacccactttatatcctcactcatcattctgatgagcccatttcaaaccccaggacgcacatggtaggagagggacaattcccacaaattgttctctgatctccatgcacatgccatggcacatgtacaatgagcccatgaacataaaataaataagtgtagttttaaaaagattgttgtggtcaaagtatgctgcttcttccgtgccccccaaataaaagcatccagctgaattaaaggagaattaggaaatatgcagggtagaccttgttctacacatgttcttggattttgtccagcctggaaatggatcttgcctgcatgggcagaggtcaagtctagctcttacaagccatattaagactaaaggatagttacaccatgaagaaatttgaccaatacagagacatcttgggattaggttttcatcctgtttaggactaggtttgtgcacctgtttcatcctggtctgggaggatgagaaagaaaaggctaattttgaggccgtttgtaagacaagatgagcagagccatgaggactttgagagtccccaaaagactgtttgttgttgaactgtgccttgctttcaagttcactagagtggcatggcaccacttctaatattattctcggcatcacatctgattcatctttgctgcagctcagttgctaatttctaggatgctgccttataaaaacaaacaatgccattaaatccaacccccaactgctttcgacagtacctactgatgataagaacctggtcaacacttaactgtgttttagctagacttcagaatattgagtaaaatttgaaatccctcacagaaactcagttctattacatggcacaattcccagacatgtcatatgagg

SEQ ID NO: 49 - DNA, 776943 bp, Homo sapiens
ggtggactttgagaggacagaaagcacaccagataaggattctaacctcagctcagtcgctggggaacaaagaggctttgggcaggttattaaacacctctaggctgcacttttctcactctaaaaagaggaagtcagacaaaatctctaatgtgcttttccttctagaattataatggcccagatggcgatagggtcagagggctgagtgacccctgataatgctgtgcactgaccttgaggacactctgtgtgtgactttggacaagttgcttacttaacttacttgagcctcagtttccacatctgtatagtgggggtgatactttaggagatggtgtaagttttttttttttgagacagagccttgctctgtcgcccaggctggagcgcagtggcatgatctttgctcactgtaaccttcatctcccgggttcaaacaattctcctgcttcaacctcctgagtagctgggattacaggtgcctaccaccacacctggctaatttttgtagttttttagtagagatggggtttcaccatgttggccaggctggtcacgaactcctgacctcaggtgatccacctgcctgggcctcccaaagtgctgggattacaggcgtgagccactgtgcccagcctcgtgtaagaattaaaacgagtaggaaagcagtgcttccaaaaaggcaggctgcttgaccccacgcggtacaaaggatgatttgagcttatactccggtcttggcactcagtgggaaagtcatgccctgcccaattccctctctaacctgattgccacagagatggtcattgtgcctggaacatctctacaacacttaccaatttctccttttagcaaaggcagtctaggcttcagatggagggctttcacctgaaaacagcaagctctgattttacagcattgtttgcatttattatatttacttttacacttgccttctatttatttctaatgtatttatattttgatttgttatttatttttattttattattacagtagtccccctcttatctgaggttttgctttctgcaatttcagttacctgtggtcaaccacagtccaaaaatattcaatggaaagttccagaaataaacaattcataagttttaaactgctgccattctgagtagtatgatgaaatctcttgccaaatgctccatcctgcctgggatataaatcattcctttgtccagtgtatgcaccacccaccacctgcctgttagtacctgagcagtgttctcggttatcagatggaaaaacttgtatatactgtgtgtagagttcagtgctatctgtggcttcaggcatccacaggggttctgggaaggtatgccctgcagaaaagtgagagactactgtatttatttacctgctacttacagtgatgttggttttccaggaagatagtggtatagaatttccttttgaaataaatttaggtaaataaaagtagtctattgaagacaaatattagtaagtaattgaaaaggcagtatgacgatatggtcaaaattgtgaaggtggtctaagcattagggaaatatgtgcattgaattttgggacatgtaaattgcccattatggtctctggcctcaactattattcccctagaaggaagggcatgccctgcctacatgctttttctctgcctaccacctcagctcccaggcagtgctgatctcaccagtcttcatggaagacccagggaagagagagccgagcgagccctctgggcagtgcgatgtgtgcctgcattctgtttagtttgtaaattggttctgactcaaataatatcccccattgaatttaatggaacatcatttcaatgggccaccacattatgaaccattgaagttaatgaaaagtcatttcaatgagctaccagattatgaaccattgaatttctatactaatgataaaggggctggaattcccttctgggtcattgtactttaaatagaatatgtattaccttctgaaataaaagccacttatgcataccaactcatctatctcagtagagtgtcaccaagacagatcttgatagaaaagccaagagcaagtcaaatgaaaagctctaagcccatgaccatatatcacccagggagttcccagggctgctagagcagtttgcaggttgctttgttcaacttacagctttcaattttgttattaggagagaagaacaaaatgaaatttatagataaccaaaaggatgtttttgcacgctttcaattcagtgtagcatcttgcagaaaatgcatttagcacagtgtcctggagctcacagaggctttttctgaagggaggtctgagacacacgctgggcagtgtctgcctctaacagtctccctgttccagctgcatagtgctgtaggcaagccatctttctggaagcatctaaagtttgcgcttaaataagcccatgtcagaggtcctcagagagaaagagctggcgaggcactctgtggatgctacgaaattgtagtggctgcagtgctcagagaaacgggaggtcatttctctttgtgtttggactttctagaatggccaggaagatggcagggtctctcccaccttcaggtctctttctggattagtcagatgtccacgcaaaatccactggggaaatttccctggtgggagactcaaagactcagtttctagccaaaggtgaggatctacctctccttcctggctccaggcagcattcctagaatggtgattcttacattctgggactctaacagcattctgctgaaatatggtaagcaccttctactaggacctttactgaacttccctcttgaacccagaaaccagtttattggtctgtatttatggcttttttgcaggacactgctagattgggtttttgttctggaaggaccccttcactgttttattatttacccccagggccattaaagtactagagattgccagctggatacaacatacccgagtgaagccgtgaaaaggcttcaggacaccagagttggaagcaatgccctcagctcctcaatacacttgcaaggccctgaaagatctgaggttcctctttaaggggaaaggacatcaagctccagatgatcctcagtgagagatattgtcctctcaatattcaagagtcacctttctaaagggaacctctagattgttcatcagtgggacacgacagaggcaaaatcctgcccctgtctcccttagacctggctggataccgctttcaccaattcatggacccaagtcggccctgacagctagcaagaggccaagacccacagaaccaccaccgcccctctgtcagcaggaagaagttgcagaagactgaccttcatccattttcccccaaaggtttaggatcttggactcttgaggggggacgtgttatagtaggtagccagtcaggtatgagcaaggcaggagagggctccccacaacacacttaggagtggtgggcaaccatcaggtgatggtcagggggttaactgtttctctaaagtaataattggtcacagccagagccagggaacagcagtctcctgacagatagaaaacagctgaaactgatcagcagcttcccaataagatctcaggagtggggagggttaaggcaagatcttggaagtaggccaaagtataaaaccctgtgttagtttgttctcacgctgctaataaagacatacctgagactgggtaatttataaaggaaagaggtttaatgaactcacagttcacatggctggggaggcctcacaatcatggcggaatgcgaatgaggagcagggtcatgtcttacatggcagtaggcaagagggcttgtgtggcggaactcccctttataaaaccatcagatctcataagacttattcactgtcatgagaacagcatgggaaagacacaccctcatgattcaattacctcccaccgggtccttcccacaatacgtgggaattacgggagggagctacaattcaagaggagatttgggtggggacacagccaaaccatatgaaaccccaagtcaagaggtcaagctatgcacttggtttctcaagctgcccacttgaccatcttccaagttgtactctccttcttctctttcctttccttcctttccttactgttctaaagcttttaaataaactttcactcctgctctgaaaaaaaaaaatgtttatctttgcaaaaatatagcaaaagcagaatttcctggtttcacagaaagagccttacctttcataaaagcatcatggtttataattttttaaaccatcaaatgatcatctttgggaagcagggtgcttggcaactgtgggataacaaggctgaagaagggatgcaccttccagggaggccactgtgaaacaaagggctttaaaaaaaattccatttttatttttgatttgagggtacacgtacaggtttgttacaagggtatattgtgtgatgctgaggttagtgcttctattcatcccaccatccagacagtgaacacagtgcccaataggcagcttttcagtccttgctccccttcctcactcctccttgtggagtccccagtgtgagtctattgttctcatctttacgtctgtgtgaacccgagagttgattcccacttacaagtgagaacatgggatatttggttttctatttctgtgttaattcacttaggataacagcctccagctgcaaccatgttgctgcaaagaatgtgattttttttcctggttgcatagtattccactgtgtacacatactacattttctttatccagtgcaccatcgacagacattcaggttgattccatgcctttgccattgtgaatagtgctgtgatgaacataaaagtgcatgcatttttttggtacaatgacttattttcctgaaacaaagggaccttgttttggagaacattatgacaaaagcagacaccaggaaagcaagtcagaattggaagtaaatgaaactcttagagatgttgtacttcctgacttctctccttattcccaagagggtttgtaagtgggaaggatgatctcagcattgttcttacttgcaaatattgcaaaagctaccaggaagaggcaggagtaagtccctgcttcatctgcacagtcccttagattgcggtcattggattattttggagcactaggagtaagaagtcaagtcctggactgcccaggcattgaactagagcttttgcaaagattaaatcaggaatactctaagaaaaggattagaaagctttttggtctgtcagtcaggaagacaagttctgtagcactgaggaaaatctttttccttttggtgccttcttctcccactagcaaaaatgggtggactgatttttgccctgcctacctcccagaggcaaggcccacagtagtggtgttctgctggggggtgacactgatcacagagaggaaagggacacaggaatctgcagaatcgttattctggaaatcctgcagaatggtggtgaaaggtgaattctaggcagggcattgtgcctgagctgtgccttctttgacctagccatggatgtcctttggggaatgaagatgatgttcttgcaagtttgtatcttggcaggcaggtggcgcaatgattgaggaggatacgatgagaccacagcattattttcttccaatgcactggctttgatgtgttagaaaagaagagaattactttgcgggtaacatgccctggctcaaagcttcttcatcacaattggctgatctgaggccagtgacctggggcagggctgggaagtatcccacggccagactgactgccacaggcacctctttcctacacacacctgctctcccgaggcactggagacaggatggaagcatgtcagtggaaatcttctggacatcttttttgacaactagaagtcatttgcacacagttttataatttattttaaaacatattaaactttggaatcatctaaatgccaggagtatgccatctactgaaatgttatccaattatcattttttaaaatagtgttttccatgatatttaatgacttagagaaaatgctaacagtttcatgttaagggaaaataggataaaagttagatgtttaatctaaccctaattttgcagaaatacacacccaaggaaaaggtatgagataaatatataaaaatattaatagtggttattttggggtggtaagattctatgtgacatattcttttttcttgtcactgacttgaagcttatatgaaacttttatattccaaagtttataatacatatgaattattcttacaagcagaagtaaatataaaataaatatctataaaaatgtaagcatgtgaaagcttgttctgtaagtcccactctccagcattataaattacaaacagataaatcacttcagaggtaacagactttccttgtcgtgccaagtaacctggcagagctaagcctcagttttctcacctgtaaagtgggaaaatagctacagccttttttttttttttttttgagacagagtctcgctctgttgccagttggagtacagtggtgcgatcttgactcactgcaacctccatctccccagttcaagcaattctcctgcctcagcctcctgagtagctgggcttacaggcatgcgccaccacatccagctattttttttttttttttttgagatggagtctcgctctgtcgcccaggctggagtgcagtggcgcaatctcggctcactgcaagctctgcctcccgggttcacaccattctcctgcctcagcctcccaagtagctgggactacaggcatccaccaccacgcccggctaattttttgtatttttagtagagacagggtttcactgtgttagccaggatggtcttgatctcctgacctcgtgatccacctgccttggcctcccaaagtgctgggattacaggcgtcagccaccgcgcccagccaatttttatatttttagtggagatggggttttgccatgttggccaggctggtctcgaactcctgacatcaggtgatctgcccgcctcagcctcccaaagtgttgggattacaggcgtgagccaccgcgcctggccactactgcacttttttacttcacaaagagactgtgaagaccaagggtggttagaaagagggatactgctgactttaaaagaaaacacagtggtgattcaaggaagggcagggttactggtggcagtaacagttgagatctgacatcaagtcatagtaataacatgaactttgttagctgcctttatccacaacagcttatatgctggtaggactggtaactagataattcatactgttgaagctgtagggttttgttgtttttttatcaatttttcttatttttttaagtgacaaaaagtgtgtttatggtgtacatgatgtttcaaaatacacatacattgtggaatggctaacttaagtaaattaacacatgtattacctcacatacttatcatttacctgtgatgagaagacttaaaatctctcagtggttttcaagtatacaaaaaaacattgtttatccacagtagtcaccatgttgcacaattagatctcttgaaattattcctcctgtataactgaatttttgtatccttggaccaacatcttcctgatccatgcctccttcctactccctgtagttttttttttccagcagggttttcctcttggaattttcatatctcaaatttcagactgttaaattaagtcccttttttgaacattcatgaaataatgtcatgtgccaggaaaatccaccagagggcgctagatcatttaaagagtcaccacctggcttctccatcgcaaaatcgcgaagattgatgtcagagtattggaactaggtccaggttggaggaaaagaaaatccattgcacattaattgcgatgctggccaacattttagcaaataatcttttttgttctccttttaccttagtcactctgcttttttagtatgtatgtttatgcacttccttttacttcttttaaatcagttaggactgttcagattagaatatttaagcttgaaacctctgatttgctttgagagctgccatagacacacatgcacatggtacagaggctgcccttctctctgggaagcttttgaatgaatttagaaataaaaataaggctcgtggtgttttcagaacagagggtgaagtttctacttctgttgagactttcagttcttgtgcaatggacctcaatttccagcctgcagacacacctacattaggggaagatgtgctgggcttagagtgcttctctatacctttcccatttccaaggctgtccagggactggcaagaaaaggagtggtgttgggtagtcagagagctcatttaggctggaggggctctgctgtgccctggagtctggccacagtctggctgtggacatgctgtggacagcatgacatgcaggcatgtgcacatacaattacgagctcaggggtcagaagatctggttagacttgcctgtccatttttggggtcacagtaattatagttaagatctgtataatatttccttccttcctttttcttttttctttcttttctttctttcttctttctgacagtttcactctgtcatccagactggagtgcagtggtgcaatttcggctcactgcaacctccgcctcccgagttcaagcgattcttatacctcagcctcccgagtagctgggattacagacatgtgccaccatgcccagttaatttttgtattattagtagagatggggtttcaccacgtttgccaggctggtcttgaactcctgacctcaggtgatcccaccgcctcagcctcccaaagtgctgggattacaggagtgagctaccatgcccagccttctttttcatcctcacatataacccttcgaggtaggcagggaagtttctggctttattttgattgtataaatgaagaaacacatcaaatcaaagatacctaaggttccttttaagtttgaggttctgtctgtgcagagccttttcctaaatttgtaatgccaggggccaagttttctggaagtggtgcaaaagtttgtgaacaatgtggaaatggccagagagaactgggcaaaggcctgggaatgtctatttctggtggatggtagcactctctcagtgcttaccagccaggccattcagggaggaggtgagagactggggattgtaggaaggaaaggatattgacatcaacactgagagtttctgatgattcctgactaagccgaggctttggacagcacagaagttgctaaaagcttcaatcagcagaggcaggggtgatgaagagagcaggagatggcatctgaggggcctccaagcaccctctccaaagatgctgaggtgatgaaggtgatgatggaggagaaaaagctatagatcctgcagttggggtgacagaagtcacggccatcggctgcttaccagtagaccccagactggcatttcaggggaatccaggctgtagggaatgtctaagaaggccccagaggggatttgctggtttgcaaaatttcaattttgtgggtgagggaatccattctggaggtttcatatcccactggggagacagtcctatcctttgctgccctttttatgttctgggtgttttatttttaaatttcaaatcttggccttgatttaaggaatgtccttaactttcttggcattgctgaggcacaaaagcagcaaactacagccattgagaggctaataaaggaacctcaatgccatagtcaccttcctgcgcatccccacagcacttctgggtcccgctcccccaacccagtaccagaaaaggcccagggcctttgcatgcttgggtctggtgtggcagggatgcattcagagtggctgaacacagaggccgaggttggaggtactatgggatggtatggagaggaggctcagacaattccattttctggagcacactttctgcagctcccttttacatacacttctttttgagaaccaaatactcaagaactcttacctcattccattttctcctttgactttggccttgactctttcttagtggatgtgtactctaaacccaatgaatgtattccgaatcaagcaagagagaagcttcaaacatcctcttcagcctctctgcccagctcagcctcccttgctcgctcttccttccagagacctccaaggacaagggcagggctgatctgactctcacggagacagcctcaggtgtaaagctaaggatgctaacttgggccttttccatgggaagagctgaaaggaacctgagaattccaattaggcttaaactaatgagctggaaactttggggaaaccactgcagcaatgagggaagagcgtgatcatcctcgatttaattagcgctggaaaaacttggggtccagctggtagcacgaggacggacgctgttcagggggcgcaaagtttctgaaagtgtcagaagggggattcccctggtggtgtacggagacacgctacggaacaaacacggactccttcttcatcttaagtggggagaagggaagaccctaaatggggaacggtgagccagaatgaagtctggagtccctcttcccccatctgccctcctcacgggatggatggagtctgagactatatgagaggaaagcaacccttcagggaactctattgtctatcggggcctgcactatccccaggccaggtcgtccttgatcatttctgcctactctttgttgggcagcctctgttgctaataaggaaaaaggagagaaaccacctgctgctgtcagaggccacagaccacccgctggccttcctgactctaccctccagccacacgcgggaccctgggcacataggtagcaggaagagcgaagtaggggtgggtagctgtgtgtatcctggcgtggggtcctcctcactcccgaagcccgagggtcctggggagctcagcctgtggaatccagttgacagctggccactcctcccctccccactgggggctctttggggaaaaaaacggcctgaccggggcgccccgccgtcctcccagtgtaccccaccgctctcggctgggggcgcagcaccttggagagaggcgcctggccccgcgcctgggctgggggcgctctaccttgcgccctgggggtcaggggcgcttgccgggccgctgccgaggggccctgcccacccctgcccagcccggagcccaggcgagccagcgcggcgagcctcctcccctcccgcctgggtcgtcctgagtccgcgcccgctccagttgctgcagctgctgctgctggcggctgcggggagcgcggggcgcgcgccgaagaggcttgggcggcgaggacggggacgaggaggagtcggaggcggcaaggaggaagagcgagcggaggccgaggggctcagcggcgtggcgacaggactagggggtcccgagaacatgggctagcaggcggccacgggccggcggccggacgcggtgaacctgccgcggccgggcgcgcactggcgcggcgagccggagccgagcgcagccgggggaggagggctggcgcaggggcgcccgggcggagggggccgattatccattattaacgagttaccacctaataagcggagagcggctcgttagccgcgcgggaggcgctcggggaagggggtcaccggccgagcgcagcgcacacccgtggcgcacggcgggcggcgcggcgccgaggacacccgggaccgcgcgcggagccggggcgggcccgggggcggcgcagaccccgggcgcgggcggcccgcggcgccccctggctctcggcgctcggggccagcgcagcccggggcgagcggggcgcgggccggggagggggagctgcccgcgcactccatccccctcccccccgggcgggcggcggcggctcgctgtatatatctcggcgcaccccgccaggtcgcgcacagcgccccgagcccaggcgcctccccgcccccctcccgcgctccgcggcggcggcggcggcggcagcagtagcagcaatatggctgttgatgggtgtttggggtggcgctggcggcgggaggagctcccccgagcccctgcgccggctgcccgttgctagctatggcaaatggtggcggcggcggcggcggcagcagcggcggcggcggcggcggcggaggcagcagtcttagaatgagtagcaatatccacgcgaaccatctcagcctagacgcgtcctcctcctcctcctcctcctcttcctcttcttcttcttcctcctcctcttcctcctcgtcctcggtccacgagcccaagatggatgcgctcatcatcccggtgaccatggaggtgccgtgcgacagccggggccaacgcatgtggtgggctttcctggcctcctccatggtgactttcttcgggggcctcttcatcatcttgctctggcggacgctcaagtacctgtggaccgtgtgctgccactgcgggggcaagacgaaggtaacgcgcgccccgggcgcccgccctctgcgccagccccaccgcttctcggcgtcccctgcagcccacctcctcgctccgcgccgcgccgtgcctccctccatccccgcctgccttcccctcgccgccttcccttccctcggctctcccggtgctctcggatcggggcagcgggcggcgcgccgggggtgaggagttgcccccagccagtgcgctccgggacgcggacgctcaatcctgtcctcttgtttattgtagggttgttggcggctgcggctggggccggggtcggggactcacaggctcgggtgccgtggtgcggggtggggacagccaactcagcggggacggaggaagctgggggcagctgggtgcgtgttttgcaccgctcacctgccggggctcggctcctggcggtgggcgagagggagcacatccgcccatactttaggaacctgttggggagatgagttcgtggggtcagaaagaagggaaaaatcctttgggcaagggagagaataattttgcacaagggaatcccgggggaggagcatggcccgagataacagggggacttcgaggggcgagagaagttggggagatccatcccactattgggggtagcccacggggctgccacttttggaatgtgtcgaggtcgcatatctgatgtaacctcccactccgtcccttaggtgctctagtggaacataccccaagttcttcggcctctgttcctttgcccccaggccacccactttgggtccccggaaatgccaccagcagcgcggagctggagcgggagtccgcctgaggccgcggttttacgcggagcgtcttccctggcgctcgaggtggctagatgtcgtcggctttagctattcctggtgcagacgcccaccggcactgaggctggcgacaccttcgatgtatggttgctaggctcactgcctggtctgtagtcgtgtccctagagatgtcttcccttccccacagccactggctggagtgggggacccgacactgatagaaaactgcagaataaaaaagaaagaactggaaaaaagagagtgagccagctgccttctttctgagtaattcccatcctaggggacttcacgcgcgaaccgttttggagggaagggaaatccaggggaatagtgcagggtagatacacattgcagcctccacatgttcacatcttttctagtaaagttaaaccgaggacccctcaaacttctacagggcacagcaacttgtagcagcctccttggcggctgagagaagtagggaagcctggggctatgggtgaaggctggctatgaaaacaccaggggggaaggagcctgtctctcctgatcattaattatacatcctgttgggtgctggagctcagctgtgttttgtggcagcacatttgtgttttggaaaatactggtgtattggaacaaagggagaaatatgaaaaccatcattctcttcgtcattctctggcttctccggaggcctgcaggtgctggtcggagagttttctttggaattaccttctcagccgtagaggtttcttcttatttgttaaggaggcaaacctcccaccttccagagaagccctcaggttaagcaaagccctatacaccagatccctgactagccttcctgctgagaacagcttattcctggagccttcaaattcccacattccctctctccatccttctcctccacctcccccaacagtctcgggaattttgttccccggtttactgagattcagcgactgtctttaggggaaagatagctcatagttgtgtgcctctgaaatgttccctagatagagtgatctgggtgaactttttaacagcttgctttctttcaggcagggggcaatttttatcataatgaaaactttttccatgattgaaaataagttgtggtgtttttgtgaacctggggtcctaaacacagcttccaaagtctttttatgttagggggtacataaatgcaattgcagtgtctgtaatgaaatgctaatcccatcgcacacacaaaggatctcctaaatgatgagcaagcataacttctgtcagtttactcaagaaaataggtttttggcaacgattagaaaaaacaattcgtaaatatttggctatgttttgtagccccaagacctgctgagtggacataactggaagtgagttgctgtaagaaatctgccagggatgagaggtgatggtggtttgtttggaagatgtgaggccagtatagaatgagtgcaggttccttttgataccgtaagtccattttaaagcacacctagaatctcttgatacctgcccctagatttgctcacttaagccataggtagccagctcattatatgcagtaacggtaagttaggccttttaaaagcttttctttctatgcttgaggtctgtatttttattgcaattgtgtgtgtgtgtgtgtgtgtgtgtgtgtgtgtgtttgtctttttttcttttttctttccaagtatttggtagttttgtcaagactcgatacacaggcatgtatttggcttaagcttagaataataatttttgtgctagatttcccaagaaaacataggctgcctttccagaaaattctaccagccctcagatgggttcaccctcaccctccttcagccccaagatggtttgatcaagagctggagtccagaggaaagcaggtctgaaattctgtgggagataaaattcagcaaggagctccaatttcatgagcgtttggtctctgggatcgcaccaaacctttttgatcaaaggaacccaagactgtggacatgcatcgtgggacatctcttcattagtacctttggcctctgaatctcaaacagtgaatgactttagtcttttgaaaagagtggcatgtggactttttcagaaagtgaagaagaaaacattacaatttcctcctgttgggaacttggtcacagtcattccagtactgtgttctttgctgtactttttcacattattgtttttttccttgtgggatttcatcagagctctctattcacttgggtgtgacgttgtgaagttcaatcctgtcatagactatattgaatagggagctgctctggtagcctgaataaagccatgactttgaagaagttatttaacctctctggtgtctatctttccttgtgtataaaatgtggggattgaattctgtgagttctaatgtcccttcctgctctgtgattcgatataggagagagggaggagttgaggaatgagggttaaagtttctagctcagaatgtgttttgcagttccctagcaattcctttaggaattcagccttgggacagttacatatctttatttccatcttctgctcgtcttccagcatgtggtctacttctctttaaataactggggaaactgaggccaacttcctgttggagctgtggtttgttgaggggcctgagtgtggctgggcatagagttatttccattctcagtttgagctgttggccttgtagaagcttgggcttgatcaaggatggtctgcgtgtaatgaattatcgagatgttgtctccatggctgtgcctgagaaaacaacacgttttctctgtcaggctcgtgactaatataaatatcagatcccattacagcttggtaattacccagggtctggcctgacgcagtcaatcagggctggagcttcagtgccgtggagctcttgattccagattggcccttgtgcctcatctcatcctgtcctggggattggctgcaccagatgaccttgagatactcctttttgagcagatcacttggggtggccttggaggagttcttgggtcctagtcacgggggagctccagctgacctgcccttgtccagagagctcgtgctcctcattccttgctctctctctctctccttttattaatttttttttttgagatggagtctcgctctgtcacccaggctggagtgcagcggcacgatcttggctcactgcagcctgcgcctcctgggttcaagcaattctcctgcctcagcctcccaagtagctgggactacaggcgcacgctgccacacctggctaatttttgtattttaagtagagacggggtttcaccacattggccaggattgtcttgatctcctgaccttgtgattcgcccaccttggcctcccaaagtgctgggattacaggcgtgaggcacggcgtccagcccctggccctctttatggaaatgcacactttagtacaagactctgcaatcaggcaaacccaagttcaaatcatggatctcacatttattagcagggcatctttgactgccaaccatgttgagctttggttacatcacctataccaagagcatactgatgcttactttgtagggttcttatagggagcaggaataatgggcacatagcaccctgcaaatgccagacacttagcaggcctcttgtaagtggtaactatcatagcttcatgaagtgctgagtttattttccctttgattcattgaacttatagcccctgaagggcgcagactataacaaataaagtttttgagccaaaaggaggctttagatcctgaagtatactgtcatagatcaaaaaaccatttagagtcagactgagacatgggcttatggctcttggctgttgcaaggctggaaagttagggcagggcagcagaggtaggcttcacggatggggtcctggcaggatggttacagttttgatggtggggtatcagtggacgaacatcgacagtatgggggaccaggagctgctgggctggcagaagggaaacactgtggcatttggtgggcaggtatggttgtccagcattgtacccttgaggagggacaaattccatccctgttatcccaagtccagaactcatagacctgtctcccaagtgatgtcacggtctcttggccaggacactcactgtctacccagaccagcttttccaagacaccccctaggccaggtttccccaagtgtgttctgtggcacacctgccttttaaattaccttgtgaaaaaaaatcagcaggcatggcgtggctgagcttcccctttggagggccacatcacaggcttggcggcatcctgctggtagagaaagtggttaaaatgccctcaaatgtgctacctgtgagcagtcttgcttcagtgtcaggggtgctgtgcagtgcccaaggttcagcctgtgatcctgggcaaagacgtcatgcctttgtgcctcagtttcctcacctgcaaattgaggtctgtgatagagcacagcctcatggggtggtttttttcaccaaccccattttatagcatttcctaggaggacactgagaacctatggcctccctttgggagccttgggctagccctgcttctaggtgcccaggaaacttgaccaaacatacaacaggaggaaaagaagagctgcctgccccctgctgtttggcctgggggataaagcattccaatggtaagtccaaatggaccttctctttgcctcacagctattttgttccctggatggggacattcattggtggctgatagccaggagtaagtgcttgctttggggctgtctctctctttctctctctctcatcagggcatgagaggcctggtgcagaaacagttacattggcattcgattgcaatgccaggacctccttcccaaagtgggcgtcccggctcacactggcagtgaccatgctaatctgtgaatcacagcagccaataccaccttgccaagctgcagatcccctggaaggtcgcctttgtggttccagtgaaagggctgtttgtgctgtgatgccaggccctgggccgtgtggggaacactgggtcccttggagacatccctggggatcagacagggccatgcctttctgtgcacagtcagggagcagaccaaggatgtctcttttagaactgcttcttgggtgggtggaaccccacgcattaggcacctagaaaaggaaacccagggaccctcggaggcaagggtgtcctagcactttggacagaaaacctggggaatgttcagtgggaatatcacatctttatctccaaggactggagagtgtctctaggcctgggcttctcaaactttttttttttttttttttttttgggacagggtctcactctgttgcccaggctggagtacagtggcatgatcactgctcactgcagcttcaacctcccaggctcaagtgatcctcttgcctcagctccccaagtagccaagacttatgggtgtgtgccaccacacctggctaggttttaaattttttacagagatggggtctccctatgttgcccaggcttgtcttgaactcctgggttcaagtgatcttcccatcttggtctcccaaagtgctcccacagtggtgtgagccactgtgcctggcttagtcaaactttaatatgctcaggaatcaccgagagctgttaaaatgcaggctgtgattcagaagatccagtgtgggacctgagattatgctggtctggcgagacacaggctatactgatgctgtgcagaccacactttgagtatcaaggatctggtccatccctcagcctccgtgcagtccatccctgaagacaggcttatttttaaatgtggaaattcccagctcttgaagggggaagggatgagaagcagaaggtttgctctgccagatcgttgggtggagaaaactcctttcagaccagggtagctgtggttcgggctgggctcttatttgcgaaaactgatggtccaggtgcctgctcctaaggaacccatcagcgttgtggatttagggttgggttgtggtggccagagcagtgtttacagggtgtggtctgtgtgttacccaccaatgtgtgggctcttcctcgtgccagttggtcattctgcaaagggtgtgacttcccgaagtccaggagggcaacccagccaaactacctccttgcaaaattaaaggctggtggtgtcaccagggctgcactgcggtgatgccccaggctggctggggaccactccctctggagtgtttgaagtcagtgggcattaagactgccagcctgattttctgtaggggcctgggtgggccttcccaaatggagggttcaacctcaaagaattggctgaagagctgcccgtggagtgactgggggacacgcgtggcaccgtgctgtgtggccctccaatgcacttcttaagaattccagaagatgaaagtgaaagtagctccttttctcaccataccagggtttttcacagctcacactgtcagggactttttccatgagatgtgctttttatgttgtttcatcatcagaggggagcaccatgagtgtctgcagcaggcagaatgaagaaggacctagcatcgtggcggcctgcacacagtaggccctcaaagaagtcttctggttataattattgttgttgtttttgcttttgttgcatattaagtgtatacgatgtgccagaaaccaagctaggtgctgggggaaaaataattaagacccagttctgactccctgcttgttagggcttttattagtacttgacaggctgagcagaggaaaaaacagttatcttctcatggaatatgaacatctgatctctgaattgcctgcaaactccttgagggcaggaactgagtcatgcaaatgtaaacacacgtagatgttggaaggctctttccagtagttagctgggggctgaacgagaatgcattggttgggggtggcaaatatattttcctgcttttttgggtaatttgttagatgctatggagaaactcctggtgaaagagatgggcttggtttgttgacaacatggtgcttgaatcattcgtggattttaattattcatgccacctggtttctcttgatcagtagctaacaaggatttagttcataatgggcagttgtttgtgaggtggatgagtcaggcacgggagggaagggcagtttcaaaagaatggctgctttaagatggaacttgctttgtttttggcattatttggtgattgtcttgggacattgtgtctaattgccaatttggaaatgtaattggcactccaggcccagaatggatatacacttaacgttgtcaagccgagccttggaatcatctccctgtaagatcttgttacctgtatgactaatacttcttcacgtggccaaaatcaaaattatttaacacatctcctttattttctattctttatgctggttcactggcctctctaccagattttcttggggactcagatccagtggcctctaggcatttcaaagcgaattcacaggaaagcctgaattccagccttctccccctcctcctcttgctccatcctttcttttacatccttttttccttagtggctgtcattcctgagggtttctgtggaaagttggtgctgtttaattttggtttctagcacaatagggaggaatacttcaatttggggaagaagtaattaaggtaaacattatgtagatctccccattatcagagttgacttttacttggggaaggggtgtttttttaaaaaggaaaaataggattttagatttttttttttttttgagataccgtcttgctgtgttgcccaggctggcaggctggagtgcagtggcatgatctcggctcactgtaacctctccctccagggttctagtgcctcctgagtacctggcattccaggttctcatgccccatgcctggctaatttttgtatttttaatggagacgggatttcaccatgtcagtcaggctggtcttgaactcctgacctcaaatgatccacccgccttggcctcccaaagtgctgggattacaggcatgagccaccgcgcccggcgagattttaggtttttgacttgaagtgaagttaatttccatctgttaactgctgaagtctgggaccatgatgtcttttgcaaaagagtttttaaggcaagactgtcagtaatattctttccagggtcacttctaactgtacgaaactattcagccacgatgggtctgcatctttgcatatcattgtaaaccaaattatctacaggctgttgggctgcctgtatgtgcatttcaagttgggagtataagatgagtatttattttattttctggttccatgtcttgttcttgctccttcttcccttttagagactggacagtcctctctgtcttcatctttgggagtgaactggggctggggggtgggatcgagagtggcctctgctggctgggggcttcaggtttgtagattagtagacaacaaatagcgacctgatttaacaagtgcagaagcgcatggaactataaattcacagtggtggaaggaagctttggggcctcaggccctgtgcgattcctccccagtgctggaagcccaccctaccagtgtgtttatgatctcctgaggccactattccactggggacaaacccaccttacgatgaacttggaaagatctttctgtttgcactagtccttgtttgcttctagtctgtgtctgggacatgcagaacaagccttggtggatggtagatttcaaattctaaatccagttcaggaagggacagagctgggtggtgtttccatgtccgcagtgttgagacgtagaatgaccttaaccttaacttgtgtttcctccatgaaggccactttatttttctccctgatggcttccctgggttcttcgtcctcctgagacagtgtggtttccctttgcccctttgcccagagttcagaaaacgacccattctggttgtttcttgaagtttgccttctgaggtctcttcggtcttgtcagcagctgtgactggaggcttttgactgttgctgggccataaattcacctccttatcaatgtcacgtgccttgtatctccaaggtttagcccccttctcagtttcacgtgggggttgtaatttgggggccctgccaagaatttggatgtagggtacagagcctttgttaggaaactcgagttggattccattttctaggtgttgactctttttcacctagggagacagacagtgctcttgaacctctttttgcatcacttgaatacagccgcttcttagaataggaggctgtttctttcccacctgctcattgggtctcctttcctctggggctcctgtatgcctctgctgtcatctcccctattttgctgaacagaaagaaaccagaaaagaaaagagagcaaaacacacaaaggaagaaggtgagggagggcaggaggtagagggagaggttgacaccaaggaaaaaagaatttctcctctgagagttagaggttggataaatagctaattggatggattttggttttagttacctcacctttgtcttaatgaataaatcatgtcaaatgacttcacctccaaggagtaaagcattctaccagtgggtagaatgagttcacgtttggaaaattttagctcttcaaacgagacattctgtggaatgaactgatagcacgcggcctgtgtggctcagaggtgaagcgttggaagggtttgtgggagatgttctttgtgtgcttgttaaccaagagcagaattctgctcctctttgggagaagttgccacattgacgttgttttctctttatgtggttttggaaagtggaccctttgtggctctggaaggggaaaaatgggcctccagttattcaaatggagaactcagagataagtgttctaaggcttggaggaaagatttggaagatgaaaggccttacccaagtgctagggatttttatgaccaacattagctggcaacagcttaatatacattgttgttctccttcctgcatctgggaacactttcctcccagagcttagaggaattatttcagctgcccatgaattatggccgtttctcctgtggcttgtggcagccacagccgatcaggtggtagattcttgaagagtataggaatgatgtctctagctgagcccacaagagggctcaacagtttgcctcagtctaaaaaaaaaaaacccaatcatttcttaagttctttcacaaccctgttttctccataggatttactttttaacttcagtattttatattttgtccttaatcccaaatatactacatgttcattgtagaaaacgtaggccgtgcaggggcattaaacaaaaaggacacagtcacatctgttaggatggctactgtaaaaaaaaaaaaatagaaaatcaccagtgttggtgaggatgtggagaaattggaacccttgtgcagtgtttgtgggaatgcaaagtggtacagatgcggtggaaagcagtatggcagtttctcaaaacaaattaatcattcaattatcatataatccagcaattccacttctggttagatatccaaaaaacttaaaagcagggtcttaaggagatatttgtacacccatgttcacagcagcattatttacaatggccaaaggtggaagcaattcaagggttcattcacagatgaatagattagcgaattgtggtaggtacatacaacagagtattattcaactttaaaaaggaaggcaagtctgacacgtgctaccacatagatgaacatcgaggacatcagccaaatgaaataagccagtcacaaaaggataacttccacttacatgaggtacatagagttgccaaactcatagaaacagaaagtagaagggtagtttccagggccagagggagggaagtgtttaatgggtatagggtttcagttttgtaagatgaaaaagttctggagatgggatgcacaacaatgtgaaacatgcacatttttaagtgtgaagtactacacacttaaaaatggttgagatggtacttttttttttggcagagtctcgctctgtcgcccaggctggagtgcagtggcatgatctcggctcactgcaagctccgcctcccaggttcaagccattctcctgcctcagcctccggagtagctgggactacaggcgcccaccaccacgcccagctaactttttgtatttttagtagagacggggtttcaccatggtctggatctcctgatctcgtgatccgcccgcctcagcctcccaaagtgctgggattacaggcgtgagccactgtgcccagcctaagatggtacatttttgtcttctgtgtatttcaccacaattataaataaacatttgagaaaagggaaaaacattcctccaaattccccctccaggagatgaccagcattatctttgggcacatttccttccctgacatgttctttacggtggcgttcttgttttctcggtgggcagctgatattcttcctctaaagattgcagcccctctagaagcacccaggctgactttgatgtaggccctgcccacattgagagcagacaaatgaagagaacaaccctctttctgcctgtggggtctggtttaatggtgtctactcttagagtgaagttaagggagcgccggatttttgattttgacatatgacaagtgactagctacagtgtcttagacaagtcataggctccaggccttagttttctcatgcatataacaaattctctgatttcatgatttcaatataaagccatttcttaagtcagattttaaaactatcatttttacctgataaagaaccaaagattaagttattgagggcagtgaatccagggagaagttcttgttctactataaaacacaagagtgaaatttgattgacttgtccccagaacttcaatattgactttgatgacatatttaagaattacaatctagggacacaggccccattggaaataccatcaaacctgtcatttaaaaaaaaagtctcagaaataggtttttgtgactctactattacttctaatgatatagccacaccactattgaggttttaattttaatttttggtgtgggggaatggttcagaacatcttagattatagactataaatagtgtgctatgataggctggctttgttgaggttgaacataaaaagaaacatctgattaaagagaaggtcatgcaaatcaacttactttgatccttttccttaacttgccccaaaacgcagccttggagatagaacgttcatctcagccctgttccacggagcattccagctgccgaaagcagggataagataactgcagcttctgtggcaaaagagcaagtgtctgaagggatgattcctaaatactcagtaacctccgaaaaaaactccccctgaaccgtaagcagccagcacatcagaacttactggaatagttctcttaggttacataacatcgattcgattatgctaccggagccatgcattaaattttaacttgtcacagatacattacattaacacttcacaaatccacagagtaccaggtagctttggggtgttggtaattgtgtaggacttgctgcaatccaggcaaaaatacttacttgtacattttgtttcttctgtactatagtttaactcttttcaggggtgcaaacatcctgcaaatattctttctttctttttttttttttgagacggagtcttggtctgtcgtccaggctagggtgcagtgtcacgatctcggctcacctcaacctttgtctcctgggttcaagcaattctcctgcctcagcctcccacgtaactgggattacagacatgcaccatcatgaacagctaattttttttttttgtatttttagtagagatggggttttaccgtgttggccaggctggtcttgaactcctgatctcaagtactccacctgcctcggcctcccagagtgctgggattacaggtgtgagccactgcacccagctgttccaagtacttcttacaaaataaactaaaaatttagacaatagtgattgccaccgtagtactgaatacttgatttatgaccatggactagatatggcagaggtttttaaaactctgtgaaccttttcattttcccgtgacaggcaatgcaagtgctgtatttttaattggtccctttttaaagtcaggagatgaaatgttatcatgcaaatctctcctaagttgcatggaaactaataaaatcacgaaggtttctatttgtactctacgaacacagactgtaatgaaactaaaacagctatctccagggatgatgctatttaaattctaggcagggctttaaaatgattttcatggtgaaaacagaaactagcaactgagatgttcctgttctttcttcctcatctcaccagtgcctgttcacccatgttcctttttacttcctgacctcagaaaatgaatgtaaagcaagaacctccggtctctaagatagcctgtctatcactggttttagaaaacagcaatgattcctcctcaggtcttgcatttattttcagacttattggtacttttgttttgggaagtctttctgtgggaattggagttactattttcttaggggaaaaaaaatcagaacaaacttgtttgagtggcttctatgcattaagcattgttttaagctccttatgtttattctgttatttaatcctcaaaacaatcctgtgatgtagtccccttttaaattcccattttacaggttagaaaatggatgcatagagaatgagaatgtttttctttttttggataacaaactttgagtgattactgtgtgtctggttgtttttaaactatatgtattatataatcctcacaacaacccagtgaattcggtggtattattatcctcacttatggattagaaaactgaggcacagagaggttgagtaactgctcagggtcacacacaggtgaggagcagagccagtttaaatccaggcaggtgggctgtggatcccatgcacctaatcccacactgtacacctcatttatacctccttagctcttcctggccacagtgtgagggaaactctgatgacatagacaggactgaaaagaggagtggtgtgttgttcctggagagatgtgaggtcccttgacaagttcagagagttttgtactactgaattctcaggtatgtcaattcccaggatgagaaggaaccttaaatgttgtctagttctattacattccctgagtcttagtttttcttgctggaaaatgggataatcaccttttctctacctgacaggcagtgggctatatacagtcatgcaggttactcaatgtacaactccaggactgctatgagattcacatcagatgacatataaatgtattttatgaaccacagcacatgtgccacatctctgtgctggggggtatgtggaggcacagaatcaatattgggtcatttttctgagtgtcaacagtcttccatgaagttttggagaaaaacactatttttctctaaaacctccacctcctgggctcaagcaatctcccacctcagcctcctgagtagctgggacttgcaggcatgtgactacaggcatgcaccatcatgcctggctaattttttgtatttttggtggagatggagtttcgccatgttgcccaggctggtctctaactcttgagctcaagtggtccacctgcctcggcccccaaagtgctggaattacaggcgtgagccactgtgcccagcagaaaaacactatttttggtattaacacttacactgtacacagagtatattggaggtaggatgcagaatttaagtaggtttttaaaaacttgagagaggggtgtgtgtgtgtgtgtgtgtgtgtacatgtacgtatgtgtgagatgcacacagattcaagagagcatgggggaccagcaaagtttgcacccaccagcgaagtctcatcattaaaccatgggcctgtgcaacctggtgtggaatgatgccttattatcccacatgagatatgctcatatctcaaactctgaaactgtgttagtaaaagaatgggaattctgtgaaagagaaataaatatatccaaattccaggtctgttaaaatttagcgcacttggatgttggtgcgacagagaatttaatctgcacactcagaagaaggtagtggttaactcattcagtggttatgaatcttccttgccttagaaagatcaattccttgtgcctctccacctccgtggcctggaaatacattattatatttcaatatggctctctttctaggccattgcgcattgtggccgtgtgcctgccaaaccccgtgcatggaatatttggaagcaggagacaaattggttagttagcaaatctttattagcatggctggccttttcccggggatatggggtcatgtaagacatcatttcctctctggcaataccggtaaccacattgcatgattccagggcgccactcacatcctggtcatgaatgaagccctctggagttgtgcagtgcacagcctgcatgcccatatacattgtcttttctaggcatctagctgtgtttgtgtaaaacccttacacaacaaattaaaaacacagtgcaaagcccataattcttaatggcaatgtgaataacagaaacatcaagaatttgggtttccaaaaatggggagaaaacagaactggccgtagagggagtggccagagagaacccactggggatgtggggttatgacggcagccccagcatatcctccaaatccagcctctgcaacaggcgctctccctaacttctgatcactgtgcagctcctgacatgatacaagaggcctcccaggcctctgtgcctgttctaagcatgagccttggagaagagagaatgctcagtgccagctcatgtgtatcccatggacaaggactaataggaccctgaggacttagaaaagccttctctgttgccaactgtgctatttttacctccctcccacagctcctgctttccccaggtatttgtcagcagagcgtcttgcacctgcatggaaagtggcagttggggcccaggatggccttgtgctgtgcaggccacagcagtctccttaccaggcctggcggccaggcccggcggccaggcccagcctctgaggctggcaggctgtggtgaggatggttgcataactggcctttctgccgctggttctgggtgaggtcgagccagagaaaacagttctgcagtcgacagcccctcctgggcactggtgcaacagacaggcttgtgggcctggtgctgacccctcacggtcaggagccacccttgctcttgagctgctgatcatcactgcagagtgcccaggtctgatcaacatccctgctgggaaaagcggagatgacctggcgtggtccatagtgatccaaatgtgatagaaggctgggggtggccccagtgatggcctactccttcccttccaaccctccacctcctccatcctccaagtcttagctcatcttgctgggaatgccgccttcctgggaagccttctctacctaccctagtcagctttctctgcctctcccttccctgatgcgtcctctctgtttgtccttccatcctgggtggggagcagccgtctgatgctgcagccctattttctatacaggcatcctgtctcctctgcagacagctccttgtggacagggctggtcctggtttctttctggatctgtgcctggcaggtggtcctagagggcagtgaccaggggtcgctcaatgtggtggctggtcatcaaagcaggccctcagtgaaccacgactcctcacgttcatcctcttgggttgtaccctttggggcagagctagcccctgtaatccatgggttgcttgtaacccatggattgtggtggaaatgatgctatgtgacttctgaggctatgttggaagaaccctggcagttcatttgttatctgggaatgctacttcttagggaagttggccactacagggggaagagcgagagtgagaggaagcatgtgcgtgggcatacgagagagagagagagagagagagagagagagacagacagacagagagacactactggggcaccacgcatatgtgtgaagatgccatcatggaagtggatcctccaaccccagttgacatagattggagatgaacccaccagctgatccctctatgaattccttacttaaaagtcataaacaaaatgaaatgattgttttaagccactacattttggggtaatttgttacatagccatggatgactggaacaaataattactatttagtgaagtcctttcacaaggtccagctcctgccctctttctaggttcctcttaacatcttcccaagctctccacacccagccacttaggacttccttcatttcgttaaaccttttgatttttacctctgggccttcacacatgctgttcacactgccggacttctcttttcttgtcctccttctccccttccacttagctgactcctgtttatccagggatgtgctggtaagtgattaacaacgggatttctagagaagaaagtccctatgtacggtgttcgtcaattcctatggtataaatattcctgccctggctggtttgaagataccagtgtgatgtcacagaacatagggtattgttatccatgattggcagttgtggaaactgaagcccagagcagttcagtcacttttctgggtagatcccaggcagatatggcctctgatatgcttggcctttgagaccatgctctttcctgttctcctgaagaaccagtagctatgagcacaggtaatattgctgctgggccatcctgtttcttctagacgagtagtcttccctctgcatttcttgagttgctgcaggctttaccttatgcttaccatacctggccagttgccagttaccacaccacgctgctggtttctctcctggaccatatttatggtatctagactctggtgtgtgcagtggcgatggaatcattgaggcaacagggacctgtgagtccatcttgaggtttgataaactgtgtattagtcagctaggccacctctgtaacaagaggtcaacatgtcaatgacttaatacagcagaagtttacgtattgctcatacaaagtaccattgatggtgtgtgtggagggtgcagtgaagacacacttcagacagtcattaaagaccccggctcctttcacttgtggacctgaaatcttctaggggcccctgaaggtctctgctggaccctctgcatctgtccggatgataggggatgagaagtaaggatcatgaggggtagttttgtaggggtagttatggaagtcattcacatcacgtctacccacacagttcattggccagaacttgatcacatggtattttaactgcaagggatcctgggaaatgtagcactgcacccaggagattgaaatagatttggagaacacctggactgctgaaggggctcccgagtcccacactgagggcttctgctgtccatagctggctctgccagaaccattatcatgacccaatgagaaaactgaatgtttactgggtatttgctaggtgtcagacatggtgtcaagcactttatatgcattatctcaatcctctaaatcagcctatgatgtagatactatctgtatttttcccattttacagatgtacaaaaactggggcttgcaatggctatgtgatgtcacttgcccaagaggcatccttaataagtggcagtaccagcattagaacccagggttttctgtcttcagattgttaactcttaccctcttcctatgctgctctggagtgccttcagctctgcctcttcttatccctgtctgcagcttgaaagctactcagcttcttaaacaccttcaggataaagggactaaggggcataactgcctccctgcttcatgtttcaaagagattgtcactggtttacgttggccctaattcaggggtggtgaattgacagtagttacctgagcctgccctcatgatttgaatgcatcatctcccagtctgccctctcccactttgaatcttacctggcgtggctctttgcctggagcattgagagtggaaggctcatggatgacagaggctgcttcccgggtttcttgtctcactcctgtggtgatgtgcttcaccttggaaatgcacttcactgtagccccttctacccatgtccaattttatgtctcagcaaagtaagttcaacagttcactgctgagaaaacagggtctcaaacgtgagtagtaacataagtaatacggttgcctttctaaaatccaatggaccagaattgtaatgtctcaatgagcaacgtctctcattctagatagttcagtgtggtcatcagggacatgccctctggagccagcctactcaggcttaaatcatagttgtgttgcttgctgacctttggatcttgggcaagccacttcacctctgcatgcctcagttcactcacttggaaagtgggaataaaataatactgaaaacgccctcaaacagttcctagtatcaaattggcttttttttttttttgagatggagcttcactctcgtgcccagactggagtgcagtggtgcagtctcggctcactgcaacctccacctatcaggttcaagtgattctcttgcctcagcctcccgagtagctgggattacaggtgcgcaccaccatgtccggctaatttctgtatttttagtagagacggggtttcaccatgttggccaggctggtctcgaactcctgatctcaagtgatccacccgcctcagcctcccaaagtgctgggattacaggcatgtgccactgcacccggtcttcaaattgactttcaaatgctgggagatgtcaccccacattatcctcctgctgcctggggttgttgggaggatcatgtgttaaatgctgagggtagcacttgctacaaaccaagggctaggaaagtgttagttattactgttactttcatttggtcatctttgggagactgtgacattttcccctaatgtgggcattgacaataacctcctaggtcattggtcactctgtttctggtaagtctccactctagtccatccaggttggattgcacgtctgtggaatgtccaccccctgctggaatgtagcatctctgaagcctaggactctgtgccttccatctttgcatccacagtgcaacattttgaatgttcattttggtctcttaaattcagtcttgtgaggctcttagcctagtttggaattggtcaaaggcgggtttgagtcctggctctaccttgcattagcttggtggttgtggccaatttacttaaccttgcaaagctcactttcttcattggtaaactgtgaatactaaaaataccagccacgtaaaggttttgtgagtataatagcatttagcatcttgtaagtcctcaataaatggccctgttatgatgaagttggcctttattttagatccctctcctttgtcaatataaccaggattgtgctgaactgagggacaggagaccactggaaggggcagggtagccaggggccaacagtgagcaccaagacggacagtgaggtagtgctaaagatggaggcagaaagtagggttggaggaaaatggggtgagaaatgctcccttccctctgcctctcatcacccacggcacacccctataccactataggaaggacgagggagaggggaatggagagagaggaaaggaagaattttgcagtacgagatgtcaggcattgaaagggttaactcaggggcgaggcctcagtttgccacctgtaaaacggaggattggatgaggccattctgagggtccctggtggctccagcagtcccttgcatttttataagaattgtgattgtgctcctgcctgttctgcccctacaccacccaccttctgcagcctcaggcagttggagatgatgtcaaaaggaacagaaggggtggaaagtgctggagggcatggaatggtttctcccagaaggctgagggtctgaaaagaggcttagaagcctggtagccagagcaggacggacctggtggacccatctggtgatcctggggctgctctggggcctggtgaatggtgaatggaccagaggcaccttttgggctctgaacaaagaagaaaggccaggctccagacccagccctcctgcctggtgggctttttagttggcactttcccctatttaggaacctgtgctactctgataggctgaggcagcccaggcgcctgtgttaaggttgcttaacatctggtatttgtctccagactcttttctctatcagggattatgtgttctgaggcacccaaaacatctttctgtacaccaagttccttcatgaagacttccgggtcttctttccacttcacactcccttttatctcaagcttattctgccacaggcatttggttaagcaaatatgttgctcattggcaacttgtcccatacctgggccaggttatgaagaggattccaagagtgtcagtcatgtggtgcttgcttgggggagcccaagctgagctggggctgggtgagggatggacaagggggctccttcctctgctcatgcagtgaggtggaaagggcatggggttggggtgcaaggacctgggttcctctcttgcctcccctgtgtggtcttgggcaagttgtctaccctcctcatgcctcagtttccattacatgtagggtgaagaccacagagaaagttccacctagcacatgaaaaatactcagtaggtaatggctcccatttttgtgatgtatccaggtagaataatggcatttagcagaagtcagtttattcaagctcacctttgagtctatcttacacaaagcactggttaggtgagggatggcgatgagccccggagaattccgcatgcttcccttctttagctttccagctagattgtaagctcctaactggatccttcaggatttggcacactctggtctgtgggccactgagacaggacatacatcttcttcatttctttctgtattcccagcaccaaacacgtggcatgtctctggtgggcatttggtagatggtgggcgaatgaatgaacaaacgagcattcagtaacctcttgctgatgaattgactaatactccacactggttacatttatattttgggcactgaatctctttgttttctggctctctcagggtatttaattttttctggaagctgaggttgagcctttcaggccacctttaccaggtcccaggctccaagtagactagacacccacccaggcctgggcagtggtagggagggtgtgacccaggcattggcctgcaaatttgccccagctccttcttgccaatgacttgtcacagggctcctgaagcctctcatgcctgactgcctcagaagaaagggtattttgtgagctctgtgggtgttaagtgttgaggagcagttcccaccagcagacagccttcacctgtgtttgataaaatgacaaattcatttttttcttctctaccccatccatctcctctttccttccctgtctgaaggggcctctgtcaggccagccaccagctatcgtgagaggagccaagttcctcattgccctgtgctgaaccgaactgcagcaagttggatagaggaggcagttttggcttgaacgcaaacatcctgtcggagaacagagtgattatagttttagctgcacacggggaaataacagcacagaggtgaatcatggcatctgtttactgctaattaacccctccgtgtacaccagtgttgtatgtgagccggcctgcggtctgaaccgcctcctataaggagggctcccttggcagccaaaaccagttggcccaaatgccttgataggcttcctgcttcacttgttgcccatgtggtctgattttagataaaagcattgcttttgggccagataagctttgagttctttaatgaagcactgtgtgtattggagagaggcacagagcacccagagctgaagctggtcagtcctggtcggccacagtttatggggctcctgggaggttttaaactctgtgctgcaactggggaaggttgtgggggaaggttgggtccagggagctactatttattgagggcttacaatatatcacattctgagctggccactttacatcttagctggtaaaattctcacagtgatcctgaaggacaagtgtggttcaggagctgagactcatagaggttaagaaatcacctggtggtggggttttggggagggccacacaggcatcccaagaggtagaagacaagctcagacatccaggaacttacagacttattgtgtgtgagatagttccataccatttgtaatttattcccaaaataaacagttattgagcatctattgcatgcctgtgctcagtgggggtggggggagtagggagagagaatccagaaaggagtcagctccagctttgtcttccataagcaaatggcttagaggggattgttcattttcactgttttgttttggggcaaggaggtgtgtcagggaggtgaggaggtagagtagagaatcatcctccaccgtgaagtgaagagaggaaggtacccccacattggaaatatgccttgaggaccagaaggaattgaccagtcttttgactttcattttttaaaattgaagtctaacatacatgtagggcatgcacagacataaggtgtacaggttggtacaatgtatgcgcctgtgcagccgcctgttcttggaggcaagagccctatgagttgcatgtggtcttcaggcagaatgaggagatgccgaccacaagcgctcctaggaattcagaggaaatggagcgcaatgaacccctccaaatctagtttccaccagaagggagaggaagatgaatattcatggatcttgatctctttttgcatcatttacattttgctttctccagatttgaggctccccacctgcccctgagttctgaagaataattgtttcatgcatcacatttttactgcattgggagaaaaagagggaaaaagaaaataaattgggagaagaaaagatgataggacttcttgactagttcagccagtttcgtgaccatgacctagaatgtgcctgggtctttggccatgtccgtgaaatgtgcacattatctttgggatttgcaggagcaaggtctggtgctgggctctgatgtcctgtggcctccatatgttcttgggaggatgtttttggatctggttaggtccatgtgttgggagcattgggagccaggagaaaccagaatgccaccaggattcccatctctttcttctctggactcctttagcttgcactgttgcatttcttaaatcatgtcactagtcaaatatatactttactgttttgtggaccttgatcttgccttgctgattagattatgaactcctctttggacttatgatcagagtgccttgtccttccctgatgtgctgtcccctgcgtacctagtcttgtctgagcacacagtacctcgccccatgaatgcttgctgtgtgcactgattttgcacacagcaagggtttttggtaaagttgtctgtggcttgccattacagggacataggattggatctagataaaccagtagaacagtttctgtatctagacatctgggtgaacactggccttggggaacagcagagaagcttggaaaaaaaaatgataataagtcacacttaatggagaactcgctatgtgccgggctgggtatgagggactttacgtagctgaatcagtgataagcttttgattgcatgtagcagaaatgctcacttcaatgggcttaacattaaagggactccattgactcatatagttggaaaggtggatgacttcagatgagccttgatccggtggctcaacgatgtctccatggacccagtttctttctgtcactctaatctgctctccttacagttggccttgtcctgaggctggtttgcctctgggttcacacatggctgctgcagctctggagggcacatgctgatctgctcaaccttgtcaggaaataaatcacctttgcaccagcattcctagcacaggttctgagagttgctgtaactgaactggctgaagccagggattattgtcagtatcctcagaaccttatggatctcaaatggaaaacaaggtctgcaaggaatggggaaggtggaagtttggaaaggagttagccaaagtcccctacacatgggtggttgcatttaatcctcatagcatccctgtgaaattggcatgattatcacccccatttacagacaaggaagcagaggcacagagaggccaagtaatttggctcagttcacatagctcatggcttaagccaggaattgagcctggacagttggactccagagctttgctctgctaaccactccatggcatttttcaataagtgcttttttgtttttttaattgagataaaattccttcttttaaagtgtacatacagttcggtagttttttagcttattcgcaaagttgtgtaaccatcattattatctacattttcatcactccaaaaggaagtcctgtaccattaagcagtcactccctattccctctgctcccagtccctggctggtctactctgtgtgggctctctggatgtgcctgatctggacacttcatataagtggaatcacacaatatgtggccttttgtgtctggcttctctcacttagccaatgggagtttctgactaggatctactgtgtctgacctcaaggaatctccattcctatctttcccagcagaaaagagacagcaccgctggccgactctggaagaaagagattctgtgctagagagagagagagcctccacccttgtactccgcttaccttttggggcagcccgaggctgcggctcagtgagggcagctatggatatgcacagtgagggtcattctggattctccggcaccctctatgtgccaaggactgtctgaagccctgggaaactgcaacagaaagggctgggttgggtttcagtgtgtgtggtggggggtgcagataatcaacacttcagtaaatcaatgaatgagataatttacagtggcaccatgagaccactgaacaggggatgggattgtgtgtgttagaggggctgctttggtgggtagccagagaagcctcttttgaggaggagatggtcatatggcagaggcaggactgaggagaaagtgagggccacacaggatttgggccagaaagccgcaggcagaggagcagctggtgcagggtgggaacagggtgacctggcctttgggcgaattggggatggtgggtgactggccgccttgtttctgttttcatcgccttgttactgctttttctaaatggttcctcccacacagacatcttttacttgcagcttctgctatggaaggttttgtccactgctgacaggctgtggggagttccatccttgagtatgtttggggctttattttcagtctgtgtttttgaaacttgagccctgacttcctcttgttcctgacgcaggcctgagagtgccaattggctgtatttttttttttaaaatgaacacttattattaaaattttctctggataaataaaaattgtacttgtttattgtatacaacatgttgttttgaaatatgtatacattgtggaatggctgaattgagctaattatcgtatgcattatctcatatacctattttttgtggtgagaacactgaaaatctcttttcttagcagttttcaagaatacaatacattgttattaattgttatcaccatgatgtacagtaatagatgtcttgaatttattcctcctgtttaactgaaagtttgtactctttgaccagcattcctctcccatcccagcccctggtaaccactgttctgctttctgctcctatgagctcaactttttaagagtccacatataaattagatcacgtagtatttgtcttcctatccctggcttatttcacttaacatactgtcctctaggttcatccatgttgttggaaatggcaggatatccttcttttttaaaggctgaatagtgttccactgtgtacatgtaccacaatttctttatccatcatccgttggtgggcacttagataggttcgatttcttggctattgtgaataatgctgctgtgaacattggaatgcagacatctctttgacgtactgatttcatttcctttggatatataaccagtagtgagattgctggatcatatggtagttctatttttgatttttctgaggaacctccatactgttttccataatgactttatcaatttacagtcccaccaacagtgtaacagggttctcttttctttatacccacaccagcacttgctctctctctctctctttttttgcttatagccattttaacaggtgtgaggttataactcatcgtggctttgattgtgtagccctgatgattagtgatgttgagcacctttttatatacctgtgggccatttgtatgccttccttggaaaaatgtctatgcaacggttctttttgatagagatgttaaataaagcagttctgggcagagggagatcaatgcaagtgtctataacaggctgagagttgattcactggtgaacaggacaaccaaggtccctgccctcagaggtctgagcaattccatcatcagtgactagattgaacagataatcccctcttacacacgtatatgcacacttcagcctggagtgtgatgagagactatggactataatgcgtgtgtgtgtgggggtgcatcctctccttggccggggctcagggaaggcttccctgcagaaatgagacctacaggcccggcatggtgactcatgactgtaaccccagcactttcagaggtcaaggcgggtggatcgcttgagcccaggagtttgagaccagcctgggcaacatggcaaaactccatctctacgaaaaatacaaaaaattagccaggcgtggtggcacatccccgtagtcccagctactcttgaggctgagatgggatgattgcttgagcctgggaggtggaggttgcagtgaaccaagattgtatcattgcactcctacctgggcaacagagtgagaccctgtctccaaaaaaaagaaatgagatctacaggatgaagaggcattagccaggggtgggtgcagggggacgtgcagaggaatggtgtctttgaagactctgaggctggaacaaagcttcatggaaggaatgagagctggaaggacggggaggacttaggcagaaagcagcatagtccaggccacagggaccctaggaaagaggatggaggaaagaggatgacaatatgttacgggaaggcagggatgggtctcttttgtgaattacttaacccctaatggctagcagtgttgagcaggagaagggacctctcgagtggctgagtgtgggtgtcagttttcccttgctgctgtaacgaccacaaacatagtgccttaagataacacaaatatactcctacagttctgaaggcgagaagtcggaaatcagtttccctgggcttttaaagtcaaagcgtctgcagggctggttccttctggaggctctgaggggcaagtcgtttttcttgccttttgcagcttccagtagccacctgcatccccagtcttgtggctttctgctccgtatccaaagcacattgctccatctcagtttccatcatcacatctcttactttctcttctgtgtcaaatctccctctacctccctctttgaaggacctttgtgattgcatttagggcccacctggatgatccaggctaatctcttcatctcaaggtccttaattaaattatgtctgtagagtcccttgtgccagttaaggtcgcagtcacagattccagggatgaggacgtggacatcttctagggccatgattcagcccacctcagcatatagatgaatgccatttttatgggaatcagtgaggcatgctaagcaggaagcaatgccttttgcaagcagaggtaggaagatcggtctagtccgtcagctggcactggccaggctccactgtccattatcctcctcacctgccctaatctttcctttattgctcctaagtgataccacgtagcttcttcagtctcaaatcatcctactcagacccttttctgacattcagagccttccttatcccacagttctttctgtccttttcccttcctatctgataaatccttgtgagtagttgacaaaagagtgcctgaagatgtcagggcagaggctcacttctggtctgtctagttgggtgagtctgaacttgaggccccagggcttattggaggcaaactgagtcatggagagggagagtacagtaaggccactaccaagggctggctgcagagggtgcaagggttgcacgggttttggggttgttggcttccccagaggggttctttgtatggtgtcaaggtgcctgtgggcattaggtgactaaaaggactgaacacgataaactcttggtggctcttcctgctgcaggaagggaatactccaagttcccagaggagaccacccagtgatggagtgaagctgcatccttggctcccctcagctcaggaccctcagaaaggacttaggaagacgggcactgccagatacagacgtctttctggactctaggaaggggtgccttttttcttttctttaagagatagtctcactctgttgcccaggctagagtgcagtggcatggtcataacttactgcagccttgaactcctgagctcaagtgatcctcccacatcagcctcccaagtagctaggactacaggtgcgcactactgtgcccagctaattttttaattattttgtagagatggggtcttgaactcccagcctcaagcgatcgtcccctcttggcctcccaaagcactgggattacaggtgtgagccactgtgcctggccaaagatgcctttttgagggccatgaggggttgctgctctgggtctgggcatttctctggaggagctgcttgtacagcaatgattgtcccatccctccttttagtcccacaggtcagagtgggacttaggacagtgggacagtgggacccaaaacttaaagccagcctggtatttcagcagtattatctgttacctagagagaggctgatgcaggggtgtctgggaggctggagggctgcaccaagggtggatggcagagcctgagccatgggtctaggccgcagcactgccatgcggctgggaagatggtagtgtgtgggtatagtcatgggtgttgcggcttatctgcacctgcttgcgttcaggcagaagcagggtagcgtggcatggtgaggaccatggattcagttccagctcggctgctgatagctgcatgaccttggggaagttgcacatcctccataagtcctagttttctataacatgggcatccctgatgtagagcatttgtgcagttgtgtgtaaaggatgtggcagttaggaagcacctaccaagtgtgagccatttctgttgtcattgccatgtatcagccagcctgagggcctgcagggcctggcctgggatgtgggaaagctttccagaaagggagcaggagatggcgccctgtcacctccctcaactgggccagagtgtggggaggctgctcggggcttgctccttctgaaacacccctgacgactgtcccagcagaggagggaggctgccttggaagcctggctgcactgtgtagggagggtacccagcagagggctgggaggtctccaggcccctttgagcactgacagcccatcatctgacctctccaggaacccacgagaaagcatgagatgaacagacagacttggcttgaagctcacttcctagttgtgttactcctcagggcctcagttttgccgcctaaaagatgggaatcacgtcccacttgccgggtgctttgaagctcaggaaagatgaagcatctcttttagaggccctcagggctgcaggcaccatgccagctctttcctgtgttacctccttaaccctcttcaaggagggcatccgggacagtccctggcaactagcaagcacccaacacagggcccttcttaccaggtggcctctgaggacctttcagccatgtgcccctgggctgcggctgggcgcggtccttgggagggatgtccctctgtggttcctggaaagcccggcagctggctgctttgttctggccactgggtgtctgctgttaggactgcgggttttatggctgtttccttgtgctcaaccttttataggtgaccctgtgttttttggagccacacctgatgggggccaaggcctttgaaatgttccagagtctttatgggctgcagcggcatatggtgggtggcccaagctgcctgacaaggaaggggtgggggagggtggaggcagggaggccaggacctgcatttccaggtgagcctgagacctcagacggatgtgttgtttttctagttgcctacttaggtctactaatctttaggaaggaatgatagcctggtttatgggatatgacataagtttttctaaaagggacctgagatgaagaattaggcaactcttttttttggggggcgggggatggggttttgctctgttgtgcaggctggagtgcagtggtgcaatcatagctcactgtagcctccacctcctgagttcaagcgacataggtgcacaccaccatgcccagctaattttttttaattaagtaaattttttgggggtagaaatgaggtctcattctgttgcccaggctggtcttgaactgctggcctcaagtgatcctcctgcctcagcctcccaaagtactgggattatagaagtgagccactgtgcctggccaacaacttttaaaaactaaaataaatatcatgcctgctgattgttttttcttgagacttctttttttcttctctttcagtttctgttactatgtccctcactgtccttgacaaaagaggctttttatgcccactgtgggttttgcaggtgatagtttagtgtagaatggtagtgaaagccatgggcttagggtcagacaaagcttggtttgaatcctgtccctaccactgaactgacttgattgtcacctagactagaggagcaactcctagcattcacttcctcggggccaggacaagttggcatcctgctgcacacagggcaacctggagaatcaagagaaggctgccagcctcagatgccagtggctccctaggaaagatagtgttagttggtccccagtaatatctggcctttatcacacacctttatgtgtcaggcaccgttgtgagcaattcacattagtcctggaggcaggaaatgtcattaacctcatgttgcaggtaggggaactgaggttaagtaacttgtctaaggccacacatgtagcaagtggcagaggcaggatttgaatcaggcagcccaatgccagtgtctgcacttagaatcactgagagccatattgcctttctgagggctgttcttgatctgagagactagagtcctctgtcaagagctagtactgggcagccctgggggctgggttgtggggtgtgggctgtggaaggagtaagggaggtgctttctgctgtgtaatggggcaggtggttgggtgtgaactcgcctgacttacggccccagctgtttcctcttctaactcctcctcccagatgcctgccaggatgccagaggttagagggaggtgtgtccaatcatggactggatctgaggtccctctccttccctgcttatgacacaaatgctcagaccctgttctcctgaagggacacagaacctgtctccctgtttggattgcaagctccagactgcatccttgaagtgggacaacagagggaaatctatctcagcctcatgatccatggacgcatctcattcagtcctgggctccttgctggcccctggtgctgcagaaatccatggctgagggggtggagatgggtgggggggaccgaaggaagctgtgcaagcctgactctgcaggaagtcctgcgaacgctggcattaaaaacaccattgcctgttgctttatttttagtggtacaaggagccctgagggcaccaggggggatgtgggaatcctattttttgctctgtcttgctaatggaacctctagcagtttttatgcctgatttgtttccctctgaagtctgtcatgcctgcagccccagactgtactcttccttgcacacagctcagaggaacatagacgatggtgtcagctgttggacttgcagccccacttcctgccagccccggcttccctgagaaggaagagggccgcctctcttgtttcatacccttccccattcttggcttggttacattgtgcttgtcaaataagcactcagctcccctctgagatgaatgcatattcccggaggtgtcccctggacatgctctgagaatgttcccatgcttgctttggttactcagaaccccgaaatccacgggagggatgagggtggttggctggcaggaggggctgctggagggctgaacaaatgcccgtgtggggtgctggtctcctatggtaggattgcaagggctgctaggtaggactgatatgtgcccagtgcccaggtgacaaatgacagacagcttgtggggcagggaagcacctcctagtgtgctacctccatattcttctacaccatcaaattttaaaaaccgagctttattgaggtatcactcacatgctataaaatttactcatttgcagtggtttttagtatatacagagagttgtgcaatcattgctattatttaattccagaacattttcatcaacctaaaagaaacaaaccccatacccatgagcagtcactccccacacccctccttccccagcctcagacgctactgaactgctgtctgtctgtacggatttgccccttgtggccattccatctaaatgtgctcatacaataggtggcctttctgagcccgtgtcatgctacaatagtgaacccctatcctattctatgacagacatgagagtgctcagaacctgaagagttggcattatcacaagcgcatccccgtctcccccaaaccaggcttcagtgccagggcagacatgggagacctgggaagcctgcccccagattttgctgtcaggcattggtgagttttgtgtccctcacaagtgggaatacattcaaaagacccctcccaccaactgggatggtgaaaagtataaaggacagtctcattctcagtgccatttagaatagggcagttttgatgaggagcaaggtgagtttcttaggtggtgtggctcttctcgaaatcaagggagctggagctggactcctgctatatcccttgctcagaactctgtactgcctggatctgatcattagcagagtctgcgccacctgctttggctcttggtccaaaaaatttgctgtatccttggcttagctactctgtgtccttgagggccaggaggttgccttgaagtccatgtggttcctggttgagtcactgacaaataaagtggccttggtgcttaccagggcccggggagaggagacaccatggtaatgacctcagacaataaacagaccattgggattggactgtggcctccagtgtcttgctgactcctgtcttggaaccaaatgcagaagctactttgtcctgcagctgatgggaataagctgccagcagatattttggtgcctagattatgaaaggagagtcaatatgtaatccacgggtataaaggtcatcacatggtccgagtctaaggcgatggtgttatttgtgcttgattggcggaatcttatgctgactgcttcttcacttcaccatttagagagtggacatcacacattagtcaatggcacacatttgggtttgaagataggttcaattgtatctccgtgttttcatgacatcttagagatcgtccgtccttttcactcatgaggctttggggtggagatagtaaaggtggctgatgtccctggatgtgagtgtgctagttcagcatgggacctcaggcagaaccttccccacgtgagccccagtgaccttctctgccgagaccctgcctcttagaggtgtgaagctcaaaggagatcatgtttctgaatacattttgcaaaggtggcaagggctgaccgtaaaagccaggcagtcagaccttcctgcctgtgaagggccaagatgaagtctctcttttgcttcgcagatgagaaaattgactttgctcagtgggagggatgtctgaccatctgaatctggggagaatcattaagtgcccattatgtggctgtcactgtgttaggcagtttgacaagcataccctggagcctgggagggggagtggtggagtggagtgagcttaaggactggaacagaagcccttggtgcatgcctgggcgctgtcacctactgactatgtgaccttgaacaaggtgtgtctgtgtatgtgtgtgtgtgcatgtgcgcatatgtgtgtgtgcatgtgtgtgtgtgtgtgtgtttgagatggagtttcgctctgtcacccaggctgcagtgcaatggcgtgacctcagctcaccgcaacctctcctcctgggttcaagcgattctcctgcctcagcctcctgagtagctgggattacaggcatgtgccaccaagcccggctaattttgtatttttagtagagatggggtttctccatgttggtcaggctggtctcaaactgccgacctcaggtgatccacctgccttggcatcccaaagttctggaattataggcataagccactgtgcccggcctctgtgtgtgtgttttgtagcaacttctctgtgtcctgatagccacaggggctgctgtgaggactaagtgacgaggtgtatgtcaggtgcttggaatgtcagtccatcccacctcctgctctccccactaggctgccacctcctcctcctccattaccttttgataggtctgattaccttcattttacagatgactctgggtcactcttcatcttttgtagaaatacctctgtagcaaatgtcatggggacattctcatctttggtagcagggagctcactgcctcctaggtatgttgttccattttggaatagcttcatgtgaatcttagcatgtgccaaggtggatgtggagtctttgcatcagaatcctgaactgctcatcctgaaaaaatgatgcgatcagcctgcttcccacagcgtatgctcagggtgacttcttgtgacatggagatggttggcagtgagctttctcttgtgacttcacacagggacaagtctgtggcattttaaggactagtgagagttcaggatggaggtgaaggagattggcccagagagctacagagttgaggagaggaggggtggcacacaggaggacggaccatcaggggctcaggctggcggctgaggtgggagtggtgtcattatcttccgggtcccaggccttgttcctcctgaccctgaaaggcagtattgggtagaggcatccccttgttttgcagacctctattaaaacaaaggagaacaatcatgtaatgatctctctaattgctgaaatgacattcaatatgatccagtaggtgcttcatgatcacacatcgtcaactctgcgcagtgggaacttacttaatctgaagacagatagctactgaaatctctagcaaaccttattcctgatagatagacatgagatgcaatcccttcaggttaaaaagaagacaagaacgcccactatcacctctcttattcaaccttgcaccctaggtcagagccagcgcaataccacaagagaaaaccaatagagacataagtcttggaaaggaagagatgaaggcatcattattttctggtgcagccatcatctggctggaggaaatcgtagactccgaatgtataaattattagaagcaacagagttgagccaggtggccaaaggtcagatattaaaatgcatattaaatgcatttttgatagaccaacagcaaataattggaaaacacaatagaggaaaccaaggctccgtgtggggcggggttttgcattatccagtgaggcatccacgctgctgattctctttctaatgatatttgtacagcatgataaagcagtatcgtatacatccagcccactggggcaaggcagatacctttattttgacttttagggaggaagaaccagaggctcagaggttagagcacccttgcccaagctgactcagtgactaggaggctgagctggggcctggccccctggaccaaccctcattcctttttgctgctttctacccaccccaccttcttcagaccttactttctccaccatttgtcttgttctgccagcttttcgttgtctgcctctagtaccagctgagctgggtgggagggagagtctgggagtgttcggatttgggttagcatctactctgtagtgtctttcatgagccacagcctgaccttcccaggacgcttgctgcactggatgcggggcagggatgggttcttctgagggaggagagagccaggcggttgtttggcgtggcctgggtccctctctctttgcgttgtctcccctcccctccacactgctcctctgagtctgacttacatctttgcttttttgttttatttaatgtgtgttcaaaagttataaaaatagcatatgttcacagcaactggtggaatcataatatggagaaaaagaaagtctttcttatttactgtttgatggctctcggatgccatgcactcctctcctgcagctttcctggccaagtgcttagggcctagggtggacccttccacttatttccccaggcccgggtcaagataggcaaacaggttttccattcattcagcaaaaatttgctggatatttactgtgtgctaggtgctggggatgccacagggaacaagacagggaaaaacccttgccctcttggagctgacagtccaggggattaaaatattttacagtgggccgggtgcagtggctcatgcctgtaatcccagcactttgggaggccaaggtgggcggatcacttgaggtcatgaattcaagaccagcctggccaacatggtgaaaccctgtctctactaaaaatacaaaaattagccaggtgtggtggcacacacctgtaatccagctactggggaggctgaggcaggagaatcacttgaacctgggaggcggaggttgcagtgaaccgagatcgcgccactgcactccagcctgggtggcaaagtgagactcagtctcaataaaaatgaaaacaaaacaaaacaaaaatatcttacagagaagtgaatgcagccaatgataagtgctatggagaaaaataaaacaggataaagttcctccctgttttgtaattttaaaggagggatcagggtagaattcactgagaaggtcagttttgcacagagaccaaaaggaacttgggagaaagccatatggctttctggggaaggagcactgaggccaagggtaagtgcaaaggccctggggcaggatgtacctagaaatgtgtcctgtcaatgggacagagcagagcatgtgacaggaataaaggcaggaaatgaagtcacagaaggaggggaaggaattggaggagggcagattgggtagggccttgtgagccttgtatatggcttttcagttgtttaatgaaaatgggatcttattacattcttgtcccctgcctcttgcttttctttttaaatttcaatttattattatttattgatacataatattttacctatttatggggtatgtgtgatatttgttacatgtgtggaatgtataatgatcaagtcagggaatttggggtatccatcaccttgagtatttatcatttctatgtgttggggacatctgaaattctttctcttctagctactttgaaatatgcattagaaatatacaatacattgttgataactacgtttttcatcctgaacatctctcctgaggcaggagagatgagatctatatcttcctgtagatatagatctcattttaaaatataattacagaattttcacggtatagaggtaccataattttttcaatcattctcttttgatggactttcaggttgttgtcagggtatggtttctttctccactacatctcatatatgttgcctttcatgctggtgttgagagagcggaattcctaagtcaaaaggtgtatgtctatatagaatattaatagacactgttagatttcgctccagaaaggttgtcgccaatttctctgatataattctgttcctaagtctcagttgcctggctttgccctctagttgctaaatagctactctgcaaagaggggaagtcacacctataaaaagagatgtccctggaatccttcatcccgtgggaaggtgtgtggccttttggcatgtgctgctgggaacaatatcattcgctcttttttggagcttgtatttgatggctgtgacgtcaaaatagccaagaagatgaaaacacagctgttgctgtgttatttgcattatggctaattttccatatgtttaaaataagcacaacaccaaggaactgcatggaaacagattcacaccttgtcgaacattggattgtgctcccgtagcatcttaaggataatgcttccccatagcatcccttcttgtgcgcatgtaaatcctggtacaacctctgtgggtatgcgcttgattgccagttcccccaacccccaatctccggatgttatggagcaggatcgtgtaaactttggggtagacttttcatctgtttagtagccaaatgtatttgtgtgatttgtactgttggacatttaggccatgtcccatctgttgcacttcaaacaatgaataatcttgtgtatgagtctttttatgcatgtatgaggatttcttttggatagatttctagaagtggaattgctgaattgaaagggacttgccatttacaagttgatagatattatgaaattgatctctggagaggaaccagtgtccctgtccacagatagtacaagtgagtgccttttccctgcttcttcggcaattcgagatcttgccaccctttttgatttttgccagtctaatgggtgagacgtgatttattttgtatgagtaagggtgaacattacatgtttgggggccatttgttttatgtttgtgaattgtctttcatgtcctttgtcccccactttttttctagtggcttattagtctcttatgtggcccagcatggcctgtccacattaggagggcatttgatactgtgattggataaactaacctatctgggctgggggcagtggctcacgcctgtaatcccagcactttgggaggtcgaggcggatggatcacgaggtcaggagttcgagaccagcctggccaatatgggtcagaaacccagtctctactaaaaatataaaaattagccgggcatgatggcgcgcacctgtagtcccagctacttgggaggctgaggagaagaatcgcttgaacctgggaggcaaagattgcgccactgcactccagcctgggcaacagagtgagagtccatctcaaaaaacaaaacaaaacaaaaactagcctgtctggctagttagaggttgatccgcgcttctttattgtcaggagtgtaaatctattaataggtgtttgagaaaaggaagagcacctcagcaacaatctagatgggagctgcattttggtgtgtgctgtactgactgttccacaaacaggttgaacacagacgtcacagaactatggggccccgaagtccatgtgccggggtacatcttttatatggtctcatttttatcctattactgggtggaagaattatgaggaaacttgactgtttgctactaaaacctttttttttttttttttttttttttgagacagagtcttgctctgtaacccaggctggagtgcagtggcgtgatcttggctcactgcaacctccacttcccaggttcaagtgattctctggccgcagtctccccagtagctgggaatacaggcgcccaccaccatgcccggctaatttttggattttttagtagagatggggtttcactatattggccaggctagtctcgaactcctcacctcacgtgatctgcccgccttggcctcccaaagtgctgggattacgggcgtgagctactgcgcccgaccactaaaacctttttttccactcacttgaatttacaacctcattgtgagattttctaggcagctactccactgggacattttgctagtccaggtggcctagctgctgtagcaagcaaccctcaactccagccatgtaacacaatcaaagggtgtgtctgtggctctgccctttctaggtacccagaatcctcctctgggtcttcagctggcagaggagaaaaagagggagcaggatcgtgtgtgaaggctttatagagcagatactctgcccacattctgctggccagaacttgatcttccagtccatctaactggagggaggctgggaaaggccagccatacgccattgttatcagtcctgaccaggtgcttggtgaaccatggtctcttagtgccctgtgggacttgtaagtttttgaagtgtcttctcaagtgtgatctcactccatcctcatagcactgacaaccctatgaggaagtaagatgagtgcttctaactcccagttcagaaccgtggagactgaggtctagggagataagtgtcgtgggcaagggtaggcacttaggtagggacacaaatggtagggagacggggtttgaacaaagagctctcatgctgactggccccatccgacaggacacaagagcacccactctgggtgtgcctgggtcaccctctgcatgtagtgggcatgggagaaaagggctgcttagcgaggggaaattggtggctggctggagtgcttcttctatcctagagtgtggcaagaaaggaagttgtctcttgccttttgcaaattgcaaccgaatggtgaggggtgacagtattgctactggtaggaaagcttggatggcagggacagaacggctgtaaacctggcacctctgggggagctgccccctcaccttgactttgaccattgtccctttcttttcactttcatgggacactagcgttgaaaaattggggcctttttcttcacactcccatttctctttatttaattattttaaaacatctgatgctgcagtgagatcagctgtgatacatcatctgttctattttgagctgcagggagacaaatggagaatactgctacctcccctcctggcgaggactgtgctcccaggagcccaatggatggaccgagccaaggcagctctgggcacaatttggatgctttcccctccaggggaatgcctgggtttccttattgtgcagatgccttgaactaacctggtcaaaaactagagagacaaaatcacagatggttgcacaggttgttggagtagcaaagacagcaccaagcagcagaaagaagatgaggcattgagtcctacgctcagggctgagcaccgtcactcctaattgaatggccactgaactttgtttcctcatctatgccaaagaaataacatttttcctaccactttcactgggttcttatgaggatcacacaagataatgtgtataaaaatgctttgtaaatggaaaagcactctgcaatttaagacattattatattaatagtaacaattaccatttccaattctggtgattcacttggggtaggagcccatagatctcatcactgctaccattactaccccacattgtacttcaaagctgcaattaccttgcacaatttcatttgatacattactgattatgcagtgttagaactggaaagcatcttgaggattaactaatccaaatgtatcgctttatagatggtgacctggcgcctggaagggagagacttatttgaggtccctagaactcaggactgtgggctgtcattcctagggagtaggctgttttactttggattatggttccctgtcctttctgaagggctagacatgggaactttgggtgggacgttgatccttagtcattaggtggagtctcagcctgactcatgtctgcttactcacgtcaaccctgctctgagctccactgctcaaggttctgggcgcatgtggacagtgcttagaggagaagctcacatgctgagaagcttgggcacagggtcaaagagaggagaaagtaggaactaaagtggtttgctggcaagaaaaagagaccagggcaattccagaacaaagaaggtggaggtgctcctggtctcaaccttggtctttattggaccccactgcctttgtgcgctctctcttactgtccactccaggggctcaggctgccggggcacactcagtgggcacagctgcaggactgtgaggcctcctctaaagagaagactgagggtcctccagcattattgtaagtgttcaaagcgtggtcagaattcatctggatagaagaacaagcacaaacgggtaaacatcctggcaagactgagtttggcctcatgtcattcacagtgccactggttggcccctttcctgcctctgggtcttgcccaaatgtcatcttgcccacatgtcacttctctatttaaggatgccaactgcacctcacctcttatttggaccatctttcccaactggatttgccatcaaaatattatacagaaaatttgcaaattagtacagagaattcctgtctacctgttagccagtttcccgtaattgttcacatcttacatcactatagaaaagaacaagtttcatgttggtctaaaactgcatgtcaaactttaagccttcctcaaatatcatcacttttcccactgatgctgtttttcttttccaggatccagtccagggtcccacattgcatgtacccaccatgtctccttagtgtgcttttgtgactcgtctttccttacctttcatgactttgacattggtgaagagtgctggttagttattttcataggcggtctgtatattttggtgtgtctgatgttttctaatggttaaagcatatgggtttttttttgttttatttatttattgctattgattgggtctctcctgccactggaatatctgctccctccgagcaaggattctcattggtctcgttcacttgtgtgcaggaacatctgtgtgtgcctcgcacccatgctcagtcaatatttgctgggcgaacgaatgagactgaactcccaggcattagtggagcatctgacctgacctgagagaaacgtggagaagctgggtcctggcagagccttgatgggcagttgggctggatgggcactaaagcctctttcagcattcaggttctgtgattttgtaacctgatggtggtatctgaactcaagctaattaaattccacaggtgtttgctgaggaagtacttgctgtggcatcctgggctgggcaaggtgggggattgatgggcatgtgcgatccaggctctgaaatgcaaccacattcccagggaagccaggagcacagggattgcatgtaaaacacaggtgtccagttagtggtttagaatctagactttggattagtggctcccaaaccacagcctgctttagaatcactaggaggacattattaaaacaccaattgctgggtcccaccctcagagtttctaagttgcttggcctgggtggggcctgagaacttccaacagcagttccagcaacttcccaggtggtgcttattgatgatgctggtctcgcaaccctatgttgagaagtattactctagatgttaagagaacacacaatttactgctaattagcaagagccaggagggcttcctggaggaggtggtcaggcttgagtagggtaggattttcagaggtgggtctgaggcttgaatctatacacagctggcttgctgccaccacatgcgatctgtggtgccttttgcctgcctttgccctgctggcacctggcctcactcgtggccttgtccaatcctcttggtacatgagtgatcttggccaggggagtctgagcccccagaggaggaggctgactaagccttagaatggagttgaccttggctggctgagatgaagtccctctgaggcctggacgtggcctgcgctgcacagcctgccttaatgtgtttatctgcctgggccttgctcgctgtctgctggcaccatatgaggtgttgctgttgagctccgtggctctatttctgttttctcgcctggcaccagcacagcagggcagatgaggtgtgtggccacccttggtttcttcctggctccaggttcttcttgaggtgggcatttggtcaggaagaacatttgagtctcgctagagtgtctggtacagaagcagctggacctttttcaggagggagaggttctgggaaggagggagaaaacctttagaaatttaaataaatttagacttagcatctggcggtggtagtgagaggtgacagcgtgctggcagtcctcacagccctcgctcgctctgggcgcctcttctgcctgggctcccactttggcggcacttgaggagcccttcagaccgctgctgcactgtgggagcccctttctggggtggccaaggccggagccggctccctcagcttgcggggaggtgtggagggagaggcgcgggcgggaacaggggctgccagcggtgcttgcgggccagcgcgagttccgggtgggtgtgggctcagcgggcttagcacttgggccagcagctgctgtgctcaatttctcaccgggccttagctgccttcccgcagggcagggctcaggacctgcagcccgccatgcctgagcctccctgcccctccgtgggctcctgtgctgcccgagcctccccgaggagcgccgccccctgctccacggcgcccagtcccatcgaccacccaagggctgaggagtgcgggcgcacggcgcgggactggcaggcagctccacctgcggccccggtgcgggatccactgggtgaagccagctgggctcctgagtctggtggggacttggaaaacctttatgtctagctaagagattgtaaatacaccagtcggcactctgtatctagctcaaggtttgtaaacacaccaatcagcaccctgtgtctagctcagggtttgtgaatgcaccagtggacactctgtatctagctactctggtggggacttagagaacctttgtgtctagctcagggattgtgaacgcaccaatcagcaccctgtcaaaagagaccacttggctctctgtaaaatggaccaatcagcaagatgtgggtggggccagataagagaatgaaagcaggctgccgcagccagcagtggcaacccgggtccccttccacactgtggaagctttgttctttccctctttgcgataaatcctgctgctgctcactctttgggcccacgctgcctttatgagctgtaacaccgcgaaggtctgcagcttcactcctgcctgagccagcgagaccatgaacccaccagaaggaagaaactccgaacacatccgaacatcagaaggaacaaactccagacgcgccaccttaagagctgtaacactcaccgcgagggtctgcggcttcattcttgaagtcagaccaagaacccaccaattccggacacagtaggatgtacacacactttgtgcgtgtgtgtgtgtgtgttcagccttccaggatcatttaggaatttttattccttaattgacattcaaaacttgatggtagaggtgaggagaggcccagggagcttgggagaggccacgttgtttgtgcagttggaagactctgggcaggaaaggagcaccacatccaagtcagagaacacgggaacaagaagggccgtccatgtgcttctgattcagccccatcgttttaactgagacctagaaaactaagtacttgtcctactccagtgctgcctccccagtcatccatggccagactaaattactctatctttcctttgggctgcaaagtcgttttatttataacacacctctcttgttttataagtagccatgaaggggtttgttttacccactagattagggattggtacattacaggtcgaatccggcccactgcatgttttgtaaataaagttttattggaacacagatatgctcatttgttcgtgtattgtgcatggccacttttgtgctatgtcagaggtgagcatttgctacagagactaactggcctgcacagtctgaagtattcactatccggttcttcacagaaaatgtttgccagctcctcccctgggaggtgagctccctgagggcaggaacggcactccgtttatcttgctgcttcttgtttcttgctggtagtaggcactcaataaatgtatgttgaataggcttgaaatgcagtggattgatttgtcaaagatgagcgccagccacatggctgttctggcttccccaggtttcctcttgctgtttggccactttgtgctccagttttctctctacagaaagaagataatattatctatcttgctgagttcgttgatctgtggtgagggtagaacaggatattaaaatatcttactagaaccttgggcccagcttccggtcttcctgatggtttcaatccaggcctagcacgggacctctgtctaaaattctctgctctcatggccctgccattcctgaggcaccctttgcctccaggctaaagtaaacacctgtcattcatgatcctccttactttgatatgataaaatatcagggcccagactgcagtcccacggccctggactccagacctacctgtctgtcttgatctctcaatcctctagggcagccttctcctacatccagaattttctgcattctgtcccctacatgaatattgcacttgttcttgggaccctatccccctctccctcctaacttcctaccttgcccctttctgcctttctgctctcagcctcctgtctgcccttgcaggtctcttttatgtctgaccttgctggagtcctttgacctcggccaacaggagtgactgtctcatttgccacttaggcactgtcttaggttttaaatttttaatctttgtggctgcttgttaaaaatacagggacccaggcttcattcccatggaattagaatctccaaagatgtgatccaggcccctttgacttttaataagctcctaatgtggttgtgattatgatcaaagtttgaggaagactaacttaaaatagagtgctttgcagtattatttctctttctgtgggactctgcttatgtctccaaataaactataaacatcttgaaggcagatctgggccttattttcttttcagagtggcacatatatctgaagactggggccgtgagatgatctgtcggtgagataactccacctggggccctgcatctgataggcgctcagtaagtgtttgcttgttgatcaataaaagacatgaaagcacctgggaaagcaaaacagcctctgcaaagcagggcattattactgggagcagatctgatgtgtaccttccacagattccactgaaggtgtcctcagagcaccggacactcaggggcccgcagcccagacacagaaagtccactctgctgagaaatgctcaccaagcagaatccctcacactctctagctttgttttctttgatctctctgagcttaggaggaaaggctcctgttccctccctcttggcttatcccaataatgcaaagccatagaagtgcaggctgctggggaaaagtttgtttggacacttaagaatgtagaaaagggtttagcttgtataaagagttttgctttctcattataatgcttggagagaagtgcaaatgtttcatctccgcctactgagttatactgcctgtttacataagcctatattcagtggcctgagaaaaggcttcttgccttcttcagggcgtgatggtgcaatcttggtgtagagtttccaagcagagatgatgctacggcctcacgtggtgggaaggctgtgtggcaggaagaataagttcaaactgtgctttgtttagaactgttgtgcaaagttgtttcttccatccaagtattaactgggccagaccctgcttagctgccaagatcagacaagatcaggtgtgtccagggtggtatggccgcagataccaagctatttctaacacaaggatgctctccttttattgagcagggagaagacagcacgtacagaccaaccatcctggttgtaaacttgtgtcctagtcagagctctttctagctggagtagaaaattcttaggctgtatgtaatggaaagagagtggagtccagcaataaaaacagatcaggtaaaaatagagctaggagtcaatagtgagggctgagttaggagagttctctgtacttccctagagatttccagccatctaagcatacgtgtgagttcttgctttgacaaataagtactccactggtatgcacatagaaacttctttcacctgtgggatcattattaacatgttttatgtggagggaaaaataaagattttagaacttctttcttccctcatgttttcactccattaatattaggcttaattattcaaatttattatattagagtcttattgcttaatttaaaaaattgaatggattattagctttttaataaacagtgacatttactgtctactaatgagggctcaaatcatgtaatttattgctgcatctctattttgttcatgaaatgaaacagaaattactacctacttgaaactggacttgttttctgcgctcctatgaaactgaacagtggagggttgctcgtgaaggatctgggacatgtttcatatggagcacaagaaaaggacgtcgaacatgcaacggtctgcatccaggtgctagaaccattttgtttttcccttcatcatccctagaaccaagagtgtgggtgggaatagctcagtagagtgaccatgtgatcctgtgttacaactgaagacaaaatctggcacagagtctctccagtgatgactatgaaactgactggtgccccatcagattcagaagtggagagtgttacatactgatttcagaaaaatgttagataaacattgggaccctttattatataccgggaacagaaaatgcatgttgataaaagtttgggatgttccatttcactctgatataaagtgtgcgtggtcagattggtttctatttttgataaaaatgaggttctggaaagccattctggctcatgggcttatgagaaaaaggttttggaaaggagttttggagtgctcccctacagaaatagcactgctttttaattgttctgtcgctagagccttggccccaaataacaatgcatgaatctcagtatttgtcttcaaggagctgtggtctgataggagcatatagtatacctatatggatgggtataactgaaggtggtgaggacctgtttttagatgcctgagaaatccaaaaacaagacagggaagttgttcgtctgggaatcatgaagcatgtaaacctaattaggggaggtggcatctgatctcatccttgcagaatacataatttttatacaaacaatgttgaagaggtgatgagaacagaaaagctgggtaaagtgcagagcatgttcaaggaagggttacaaacatttcttgagggcctgccatgtgcacagggcaccaatctagtgaaagcaatctgataagagcttggtacaaaaccaagtaatatagcttgtgcattaccttcactcctcttactccagtaatttttgagtaaaataaatgttgtctttaattatattaattcatacaactgcgacaacggcctggtgaaatcagtaccatgcttgtcctcatatgagagaagaggaaacagacattttaagttaagcgacttgcttcaggtcacccggctagtgcgttgtggggctgagactcaccccagccagtctgactgtgcaggagttgcagccatttgttcctctgttcacctcccccgatagtctgagtggcctgagagcaggcatgtgttttcgtcctcttggtactcctgtcatccagcaaactgcccagcatgtggtcagagttcagtatgccaagtacaaaagatctgctatggagattcttaagtgatcaatgggttttgagggacagcttggagaagggtagggaggttgttctggggtcagagaagaacgtgagcaaagggctagagtggctgagaggactgtgcagggagtgcatgctccagtgtcccttggccaggtgtgtgggcttcccatagggagctggaggtgatgctggaacagcgtgctgtggaagccttaagtgcagccgagtgctgggttctctgtgagacttcttagggtctggaagactgggtcagacctcagcctcctaggtgatgtcagacagccaggccttctcccagctcactcttgagtgtctctgtcagagacagagtcagagactgaatggcgtatgggctggatttcagggagcatgttcttctttaaaaacatttatggaacaaggccaggcgtggtggcttatgcctgtaatcccagcactttgggaggctgaggcaggcagatcatgaagtcaagagatcgagaccaccctggctaacatggtgaaaccctccctgtctctactaaaaatacaaaaattagctgggcgtggtggcatgcacctgtagtcccagctactctggaggctgaggcaggagaattgcttgaacctgggaggcaggggttgcagtgagccgagattgcgccagtgcactccagcctggcaacagagcgagacttagtctcaaaacaaaaacaaaaacatttatggaacaacttaaatgtaccacattctgtggctataaagacaaataagggcttcccacaagtcttacgtatatgttggattgttggtgcttgttgctaggggaggacgagtgggtagtgaataccaaggccccgtctaaggtggttgggtggttataaagcactgtggactgacggtgtttctctgaccctaaggagctgactggcagggtacccaagtcctgctcactgcgtttttgtaactgagctaagaactgaagaaatcaacaaattgccaccaaatcagatccttagtaatgcgtgataaagcatgacatatgaaagaggacacagaatttaatcatcttaccccataaatccagccccctgcaatctgtctcttgtgtgaataagacttcaatttacagaaatggaaagttccttttttatctacatatggttatacctcctttcctacctggaaggcatttccttgtatttccttcctgagtagtgatcaggacttggggttgggcaccaaagcctttaggaagtggagttgggtgtgttggcctctcctgttgagtcaggactgaggctaggcctgaaaggtaggtgacaaggttgaagccccaaaccactaagaatcaacacccacttcctcttcatctgctctgccccaggccagggaggcaaccctgagacccaggagtaagctcaatcctgctttacttgcctggaaagtcaagtcactcatcagaggaggaagagtcagtttccctcaaggatgggctcttggtcatgaagctgactgctgttgtattactcagatttcagatcttagaaaattatagcagcatgggctttgaaggccaaatacatgatcatcacctccttttgagatgagactctcctggtatgacatccagtactcagagatgccatatgccttctggacttgtgtccctatgtgagaaatattcaaccatgctctatcaagtctctatttgtcaggacctggattccagcagccatttgtgcccccgtccatctttctgtgaaactgggccagtgatgcattgacctcatttctgatgggcttcatagtgggactagttgtggtcagacctgcataagactgaccaggaagaagcccaacctgggagtccaaggagcagaagcaaggttcaggaccagggaagagcaggcagagctacaagggccaggctctgagcagtaagagattggcaagagcagccctgctgatgagcctgtcacagaggtaccatgataatcctggaccagtgagttatctttgtagcacaaagaaggttggaggcacagattgctgtggactgaagtaggaggggagggagatgctctcgtaatctcatgttgcctgagtcagctttgccttgctattggcggatggggctggtggcctgtcatgtgtgcagatgagtcagaggaagtgggccctccctggctggtggcttgccccatgccttggggcatagctaagcagttgcatgtctactaaacagtcttatctggaagcaaatatggaaccaaacacctgagcgtctgccaaggcctccaccaccaaggtcaagaagtcccccgaggggcatggctctgtgagctgcccttgtaggtgtcctggagaagcaggcacttccttgcagttggtcaagaagaggcaatacttcttgcttgtgttagggattttagagcagcggatttagggcatggcaaggttggggctacttccgggggaatgaacattttttaaaaattttactttaagttctgggatacaggtgcagaacatgcaggtttgttacataggtatacacgtgccatggtggtttgctgcacccatcaacccgtcatctaggttttaagccccgcttgcattaggtagggaatgagcatttcttcaggtccctaagcagagcttgaaaatgatgatatcaactttaatcactagcaattattaagctcctcttccacatatattaagttgtttatgcctcataataaccctgatgcaggcatcattatttctgttttacagaggaagaaacaaagatatgaagaggttaaataacttgccaaggccaatcagctagcgagcatcagagctaggattcaagcccaggcagaccagctccagagcctgagctagactcaatgtcagtgatgatgtcgttgaccttcggggacagattctgcttttgccctggtgggtctgggttgagatgcattgcatttgatcttgctggagaaatttccagtcttctcagccctgggaaaatatgtatattggaacctcagagctacaccctgagggtatgtctcctggtttgctgaatttttaaaaagaggttttactctatggccagctttcttgccaggagatcagagaccgatgacagctggcagaatcggcctctgttccagctgtctcctacccttcctaaaactcagatgctctttgaagctgtcttcctccattgaggagcatgtgcttcttcagtgacagccggagagtgggactgggctggcccctgtccttctaaggccaccacctgcagcactcctagtcaccgttccaaggtcactgtggaggaaacagaagtggccgagagaggaaaggtgcttctcaaggaggctgagagtggagggagtaaggcaactgagcacggcagttgggtgggcccaggccaccaactgtttgtcctgcctgagttaagagtccagaattggggctgggtgtggtggctcacgcctgtaatcccagcactttgggaggctgaggtgggtggatcactaggtcaggagatcgagaccatcctggctaacacggtgaaaccccatctctactaaaaatacaaaaaattaaacaggcgtggtggcgggcacctgtagtcccagctactgaggctgaggcaggagaatgccgtgaacccgggaggcagaggttacagtgagccgagatcacgccactgcactctgcctgggtgacagagcgagactctgtctcaaaaaaaaaaaagtgttgagaattgggtatcaaacagagcctggtgtctgtcctggctttggcttttagcagcctggaatcaaatagccacttacatgaaatttctaacactgtcatggatggcaggcaggtgctggagtcctactgcctgcattacccctgatgtcaccaccagtgagccgtgagacctgagtgagattggctatgtaacttgcagggtcctgtgcagaatgcgaatgtagggttcctataaaatgtatgaagaattttatgatggtgatagcagagcattaagccaagcatggattcttcccaggtgtggggacctgtatgatggcacaggttgtactctaagcctcagtttcctcatctgcaaagtggagaaaatagtatatttcccataggcttgttgtgaagtttaggaaagataataatgcatataaagtattgggccacatggtaagggcttgatggacaccagcatttatgagtgcagggtcagaaattcacagcttctttttgggtcattggcaaaagatcacggagagcaaaggtacctgcaacagtggtttagcttcaggaacaggtctggactttggtctctgcccttggctgctatggcttgggactctgacctcttttgcaaagcacagatggctcttctgcaggagcaagaggcccctcatcacatgcacaggccacatggatccagagacacctacctcctagaagtgtgtgtgggatcctggggcaggctgaccctgccctgcatttcccaagtcatgggccaggaggaaggcagtagagattggagctgtttttgatgcgttcattttttatttgctgaaatatgttgaaagtcagttaccaatatcacaggatttcatccctagagattttagtttgcatttctgaaaataaagacatttctttttttttttttttttgagatggagtctccctctgttgtccaggctggagtgcagtggcgccatctcggctcactgcaagctccacctcctgggttcacaccattcttctgcctcagcctcccaagtagctgggactacaggcgcccgccaccacgcccggctaattttttgtatttttagtggagacggggtttcactatgttagccaagatggtctcgatctccagacctcgtgatctgcccgcctcggcctcccaaagtgctgggattacaggcatgagccacggtgctcggccagacatttcttatatatatactataatcttattgtagacattgaaggtttttgtttgttttctggatttattaaggatagcattttatggaaagttagctggatatgtgtggggagggaaagtgattagtattaatctggtttgctaggacgagaggctgttatccaaattcaaatttggcattcaattcaattgctgttcatggaagaaacatccggggacacctgcctcactgccccaatgggtcagatggaaatcactttctaggggagcttctgtgactcatttcctttgctgggatcccttctgtcttccacctaaaccatcacaagggcctcctgagggtctcccagcctctggaataacaccttcactggtccgttctttactggccaccagagaggcctcttgaagacgtaacccagatcttgtctttctttttcttaaaacctcccaaaacttccccattgcccacagcaggagtctaccggccacttctttttgtatagtccatgagctaaggatgggttctatctctttaaatggttgaaaaaaacaatagacacattatattttcgacatatgaacatgataagatattcagattcaaatatctataaataaagttttattgggaaagagccatctgcattcactgatgtatcttttatggctgctttcaagcttaccgtggcagagttgagtaattgtgacagattgacagcttgttacagagaagtttgcccacacctgagctgtaggataaaattcaggcttcttcgcacacacctgtggccatttgtcactgacacccctgcctccctgatccctcctgctttgataaccttccatgctcttagcaactcccagctgccggcagatgccctgcatgggccatttccacctctgtgctttgccccttctcttctctccatccttgctgcttccttggctagacatcactgactcatccttgaagaaatccccttctccaagaaggcttcctgacctcccctctttccctttcatcctgtttggtttagtggctccctccctgtttggacaggaaaaacagaagcccaacgactccgggaggttggcagctgggcgctcagcacagagaaaggaggcctggggccaaaatggctcactgagtcagcagacccagtgcctggtatatgccaggtgctctagatgtgaagagcacagatgcaggccctgcctctgtggggctcacatcccagtgggagatacagacagttaatgcacattttaacaaatatataggggatgagagtccatgtcttgggagtgccctggccagtggctaggaagtggtggcaggtggattttctagataaggaacccaggaaggcctctgaggaggtgacatctgagtcccgagagaggcagagcccttggcggctggatactctggagcgagagggaagatgagatctctttctttgtcctcttcaggctccaggaggtggtgagaggttgtcacttctcttcttccaggctcacagcaccagcagcctaagagtttacaccagactttcaagtcagagtcctcctccctcgttgggggctgcaggcttccctcagacccttctctagagggcatttgatccctaccacaggacttaactggaagcccctttttgagatctgtgagatgtctgggattttccggccaagaaggacttcagagataggcctgtcttcatctcaagaagcaaagctgaaacccagagcagttgagtcccttggccaccgggctgatcagcggcacagccgggaccagagttctggttttctgacccttagagcatgagatcactcatcttcttctgatttaattgggggatctcaggacagatcagccactagaattgggaggaggccattaaaggaaccccttgggtccacacaccactcaggagaaaggcccactggtgaggccaaactacttctttgaagaggcttctcttagtatcaccagtggtgtgttgctggaggtgtccagaggcactgtccgaagctgctggcctctaatcccaccagtttaatttagctccagtcctaggggagctttgctaattatagctagctggccatgctgggagctataaatagggcaggaggcacctgtttggtccttactggatgtttatcaaggtacctgcagaggatttggccactggactgggtgcaatgtgggcacagaaagcaccttgaactgtgctctttattcagtttaggcaccaaagccaatgtgaactgtggagggggcagggggatgtcaccagcacaacctggaaaccagactgtcagagttcaaattctggcttcaccaccaactagctgggagaccctagttacccaagctctttgtcctttagttttcccatctgcacaatggaaatctagatatttacaaagaaggctgttgtgaggatggaatgagtgtatgtttttatctatacataagttacgtatgtgtgtatatatgtgtatacacatgtagtttagagttgcctggtgtattaagtgcaattatattgcttgatgttatttattaccatatgaaatggcctgaggacgggaccatcttgcatagaaacctggatcttggaaggaggctgagtctcggtctctcccggtccttgatgaggcaagttaagtgcctcatctttaggcagttaaggcaagttaactgcttcaactacatggcagttaagagagtgtgagccgggcgtggtggctcacgcctgcaatcccagcactttgggaggccgaggcgagtggatcacaaggtcaggagttcaagaccagcctggccaagatggtgaaacccccgtctctactaaaaatacaaaaaaattagccgggcatggtggtgggcgcctgtaatcccagccactcgggaggctgaggcagagaattgcttgaacccgggaggcagaggttgcagtgagccgaggaaagaaaaaaaaagagagtgtgtaggctcgtcaacatggggtcagttactgctgttacctcctgtttggcatgctacttcacatctgtaattctccattcttctccattctttcctgttaaactgtggtgccatagcaatgagcatttcatgggatttcagtgagaattgaatgaaataatacttgcagagcatttcacacagtgcctaacacatggtgcatgggaaacagtgtaagccattgtcgtccttcctcctcccgttaaatgacttggacaggttaccagcatctcgaggcttgatatcctgtagctctctaggctagagaatgggaccagtggcttagagggcagaaggctagcagtcctgagacccctggcctgcagatgggaactggatcttcttcctttgcagtcttcttgttccagctgttagcgtcactccttttagaatcccatggtgagctttcttgcacggctgtgtgcttcctgtgtttctgtcattgtgccccagctgggtcccaagccctgaggaccatatgcagcatgtggtggacacttaggaagcacgtctccagtggaggggacttaaatgtcacgtagtactgccccatcaagtgctgggagaggccgagagtccgcctgcttccaagatccctgaggttttgtttgttgtgacatagcaagaggagttaaaggatgggggattgtttcgtagggagaaagagaggctaagaggtagaggtggggacaggatacctgggtgcctttctgggagaggaagtctttttctttgtcctgtggctcagagcaagtctctcagagtggaggtttcaaggaggcagatctctgttagggaagggcgagttgcctggccctagacctgcttgaagtgggaagaatgtagatttggcagtcaggcctgctagtctagggccttgttcctcagacggtggttagaggatcagcagcacaggttccacccaaacctcctgggcatgaatctagatgcgtccggatgtgcacacagaagactgaggagtgctattctagaacagagcttctcaagccaggagccattctccccaatccatggctgagaagcctaaggctagaaacatgggccttgagcactggatctcaaagctctagtttcctctctggaccagtagcatcagcctcacctgggagcttgttggaaatggaaattcagaggcccaacccccaagtcagggactcccctctgggggtggggcccagggctctattttaactggccttccagtggctctgaggcaccagtgagatcgataaccaagagccagagcacctgcacgttggaaactcctggggagataaagcaaatgcttggaacaaatccgaatagcctctgggtatggcagggactctgggaacttcagatgctccccgggtgatcctaatgtgcagccaatattgcgaaccagcattttaggcctgtgaactaaatctcagcgttctcagctatcagttgggtagactaacctctgtttgcctgccagtgatgggaaggtgccttggggagcattaagacttagctccctgggttctggaaggcacaccagaaagtgggcttccatctgtccagaaaggtgcagccaagattcccgttttggaggaggcaggattggatgcccgccatggcctcaggtggaattgcaatgtggtggctgtttggtccaagtactaagtgctgtaaagacgataacctgctctggaaaaggaaatcgctagtgccttgagagaacagttcatgcattctcctcctcttgtgcttcccagcctctgccaccactgcttaattctggggcttacctttagtgaggtcatttgccctgtattcagggagctgatgctgtcagcactgtcctagcattggaacggtggggctgttggggagctggccggctcgttctgggcactggtggaggcaagaatgaggtttagagaaatatttacccaaagtaatccctttgctatgccactgcccatctcccaggaggctgggcaacaaacacagggttctggtcatcatttattgaggggacaagctttgcctcccaagggctaggaggaggcaggaacaaagggtggtggtacgatctgtggtcccagcccctgcagtggtcaggccctggggcctcctgaaagccatcagctcccactccaagcaggctgcatgtgcaaaatgaatactggattcaaaagcatcatgaagcaccagacatggaaagcattcatagtcttgtcttagaggcaaaattatatggcacttacagtgtgttgggtgcaccattcaaagtatgacctcatgtgatcctcacgaccattctatgagctaggagtcgtcatttctccaattttatgtgagcagttgctcttcagaggtctgtgatggtcagcctctgcatttcagaaataaggaactaaaggctcagagattagataaatgccctagtggtcataatgagtgagtggcagagaccttagaagtcaggtcccagtggctaaagtacatcctgaaaaagagagaatttaacgagacttctttttgattttcagtctgggatgattttaatacagaatgcctggattcagtaacaccagaaaaaacaatccacaggatgtttgtgttaaaaagattcagaggcagtcatctagcacagtaaatcctaaattttttagaccacatcccacagttaaagcacacattgtgtgtgcaaagcatacattgtgtatatacatgtgtattatatctatgtgttatatatacatgtggatacattctgctagattttatatatatatatatatacacacgcatagatattaatatatatatcttatagaaagaaaagttcctgaaacaatggctgtccttaccacatgagatgcagcttgacataatcttttcattataaagaatgttacaaaggataggtctgggtacagtggctcatgcctgtaatcccagcacttttggaggccaagatgggtggatcgcttcaggccaggagttcgagaccagcctggccaacatggtgaaaccctgtctctactaaaaatacaaaaattagcctggcattggcacacgcatgtagtcctaactactcgggaggctgacgtgggagaatcacttgagcctgggaggcggaagttgcagtgagctgagattgtgtcactgcactccagcctgggtgacagagtgagaccctgtctcagaaaaaaaaaaaaaaaaagagtattataaaggatataaatgaacaggcaggtggacaggtatacagggtgagtctggaagggtcctgagtacagaagcttctgtccctgttgagcgaggtacagacctattctattctattctattctattctattctattctattctattctattctattctattctattctattctattctattctattccattccattccattccattccattccattccattttcttaaaaaataattgcttataacctgttacatagatttcctggtcaaccagggggttgaggcctgccatctgaaattgctgttgtagtccagctctcctgctgtagaggaggatgctgaggttttgcctcatattatgcttctcttagtcacaaatctgaggccaaatgcaactgtactgagggccacccctgcccagcctgcccctgctgttacacctgaggctttgttaagagtcttcctgggtcatgtctgacctatcctgtggttttatgcctacacatccccaccgcccatgcacacactacacatcatggctcccggggaggcccactgggctctctctggccatcaactgtttcatgctcctctcctcttctgatcactgttcttttctgccccttctgagaatcagagtgaagattttgagacttagtgggaaggacttttaagctgatggatttaaatataagatattttgagagatgacttatgtatccagttctacaccagctcattcccaacctgaagtcccccaaactctgaaaagtgagtgtttttacctaattcatggaggggctggtggtgagtggaagctgccctgaactgcgaggcagtttatggtcttcattcatccagcttagtctgaattgtcgtgtgtcattgaagaaatgttagtgtgtgtgactgtgatgtgcagcccaaacctcagagattcaccttaataatttcctaaaacccgaaacaattggaattctaaaacacatctggttttgaagattttgagtgaggaatcatagagctggagatatatttgcagtgtgtgcatgttattgatttttttttttttttgagacaagatctcactctgttgcccaggctggagcacagtggcatgatcatggctcactgcagccttgacctctcgagctcaagcgattatcctgcctcagcctcctgagtagctgggactataggcacatgccaccatgcccagctaatttatatatatatatatatatatatatatatatatatggattttttttttttttggagcgacagagttttgccatgttgcccaggctgcctcgaacttctgggctcaagtgatccagacatatcagcctcccaaacgtattattgattaatcaatgaatttttttttgataagaagtagtgacagatgtgagaaagtacagtagactggttatcagaaggttggccattactggttataaaatgcacttttgagggcttttgtgaggacgaactgagtgatggctatgaagccttctggaaactacctggataagttgttgtgtgtggtctggtttctttttaaaattctgaattgtagtttctaatcctacactcattttcaacttttggcccacatcatgtgtgtatagggtaaaatatacctcttatgttgacatcctgtgacgaagaatgacccagaaagatacggagacagagagaaatgtctctacagtctttgtagattctttccccatccactctgctctgttctaatatttcccactttgttctaccttcttacagcatttcagatgctcctcaattggaactgctgactacacaggcgtgtgcgttttttcctcccttccattagccttataggtcattaaaaccttgttgctgctgctttccttttcctataaatacatctacatttcaaagttttgaaagcttattccttagaaggccctgggaactctgggctccaaagaccaaagaaaggtgtatctagctttaaattaggtacgggaaaaagcacagatctaggctctaagaaagacttcgctgtgtttacaataaatcagattgagggcgtgtcaggctttaagccaggattgaaagcatggcctttagaatacccagggagccagacctgggacccttgccaggtggggagttggaaatgagatttctgtctgaagctttcccctacaggagaaatatatccctaggggacagacaggtggtccagcagacatctgcaggggggcaaagggagaagacaggggcccttatctgttttggctttggcttgccaaaggatggaacaatgtttgctgtgagaatttgtaatcataagtctgccttcatgcaagtttggggtttgaatttgtactgcctgggtgacccaggagactccacgctgcaaaattaactggaggtagtttggggttggtcacaccagagttcctgtcagaatcaaatgcacattctctctggagggacatacttgtagctcaagccttgatggattcctgtaggtaaaacccagccattcaagcatgagctttcactctcaaaatccaaaacagatgaggaaaccagtcaccacgagtgaaagtcagcagaaacaacagacagaagaatcagattcccgagggtttcagatatagttccaatggaataggtaatgtattttaaatgtttgaaacaaatgaggaagaaacaatagactaatttttaaaatccgtggagatttgaagaatacaaataggacttccagaaataaaaaatagaataactgaaactgaagatcttcagcaattggcacacatttgtgtaagttatttttatgagcaacattaagatagcaattctcataaagatatatcaaagaaagtatttttttttttttgagacagagtctggctctgttgcccaggttctagtgcagtggcgcaatcctgtctcactgcagcctccacctcccaggctcgagtgatcctcctgcctcagcttccagagtagctggtaccataggcatgtgccaccacacctggctaatttttttttttcccattcaaaagtaatttcttttttttattattattatactttaagttttagggtacatgtgcacaatgttcaggttagttacatatgtatacatgtgccatgctggtgcgctgcacccactaactcgtcatctagcattaggtatatctcccaatgctatccctcccccctccccctaccccacaacagtccccagagtgtgatgttccccttcctgtgtccatgtgttctcattgttcaattcccacctgtgagtgagaatatgcggtgtttggttttttgttcttgagatagtttactgagaatgatgatttccaatttcatccatgtccctacaaaggacatgaactcatgattttttatggctgcgtagtattccatggtgtatatgtgccacattttcttaatccagtctatcattgttggacatttgggttggttccaagtctttgctattgtgaataatgccgcaataaacatacgtgtgcatgtgtctttatagcagcatgatttatagtcctttgggtatatacccagtaatgggatggctgggtcaaatggtatttctagttctagatccctgaggaatcgccacactgacttccgcaatggttgaactagtttacagtcccaccaacagtgtaaaagtgttcctatttctccacatcctctccagcacctgttgtttcctgactttttaatgattgccattcgaactggtgtgagatggtatctcattgtggttttgatttgcatttctctgatggccagtgatggtgagcattttttcgtgtgttttttggctgcataaatgtcttcttttgagaagtgtctgttcatgtcctttgcccactttttgatggggttgtttgtttttttcttgtaaatttgtttgagttcattgtagactctggatattagccctttgtcagatgagtaggttgtgaaaattttctcccattttgtaggttgcctgttcactctgatggtaatttcttttgctgtgcagaagctcttgagtttaattagatcccatctgtcaattttgacttttgttgctattgcttttggtgttttagacatgaagtccttgcccatgcctatgtcctgaatggtaatgcctaggttttcttctacagtttttatggttttaggtctaacatttaagtctttaatccatcttgaattgatttttgtataaggtgtaaggaagggatccagtttcagctttctacatatggctagccagttttcccagcaccatttattaaatagggaatcgtttccccattgcttgtttttgtcaggtttgtcaaagatcagatagttgtagatatgcagcgttatttctgagggctctgttctgttccattgatctatatctctgttttggtaacagtaccatgctgttttggttactgtagccttgtagtatagtttgaagtcaggtagtgtgatgcctccagctttgttcttttggcttaggattgacttggcaatgcgggctcttttttggttccatatgaactttaaagtagttttttccaattctgtgaagaaagtcattggtagcttgatggggatggcattgaatctgtaaattaccttgggcagtatggccattttcacgatattgattcttcctacccatgagcatggaatgttcttccatttgtttgtatcctcttttatttccttgagcagtggtttgtagttctccttgaagaggtccttcacatcccttgtaagttggattcctaggtattttattctctttgaagcaattgtgaatgggagttcactcatgatttggctctctgtttgtctgttgttggtgtatgagaatgcttgtgatttttgtacattgattttgtatcctgagactttgctgaacttgcttatcagcttaaggagattttgggctgagacaatggggttttctagatatacaatcatgtcatctgcaaacagggacaatttgacttcctctttttctaattgaataccctttatttccttctcctgcctaattgccctggccagaacttccaacactatgttgaataggagtggtgagagagggcatccctgtcttgtgccagttttcaaagggaatgcttccagtttttgcccattcagtatgatattggctgtgggtttgtcatagatagctcttattattttgagatacgtcccatcagtacctaatttattgagagtttttagcatgaagggttgttgaattttgtcaaaggccttttctgcatctattgagataatcatgtggtttttgtctttggttctgtttatatgctggattacatttattgatttgcatatgtggaaccagccttgcatcccagggatgaagccgacttgatcatggtggataagctttttgatgtgctgctggattcggtttgccagtattttattgaggatttttgcatcaatgttcatcaaggatattggtctaaaattctctctttttgttgtgtctctgccaggctttggtatcaggatgatgctggcctcataaaatgagttagggaggattccctctttttctattgattggaatagtttcagaaggaatggtaccagttcctccttgtacctctggtagaattcggctgtgaatgcatctggtcttggactctttttcattggtaagctattgattattgccacaatttcagctcctgttattggtctattcagagattcaacttcttcctggtttagtcttgggagagtgtatgtgtcgaggaatttatccatttcttctagattttctagtttatttgcgtagagcacacctggctaatttttgtactttttgtagagacagggtttcaccatgttggccaggctagtgttggactcctgagctcaagcagtccacttgccttggcctcccaaagtgctgggattataggtgtgagccatagcacctggcccaagacagtttttttaaaaaaaataatttacagttttacagattaaatgtgtcataatgcattggaaagggtgccctagctcagacctgagtgtttcacttaatggctgtgtcaccttgggttacactgcagccccttggatcctcttgtgtaatttgactgcatggttttgctcccaaggttcaattagatagtttttgaaaggatctggatttccctttagcctttactttccttggttctggatactaaatagtttctcccttaggaagggtccatagtttctcgtttaattaaatcagctcctgagatgaacaaagggactgtgttcataactgccggtagttcctccaggggctaggatttgctcaagagttacacacgcttatctggaagcccatggaggaggctggcggctaaaaggtaggctgccagccagaaggtcagtcttggactgcgaggctctggccgtgcctctccaccggggtggtgatggatggcggggttctgattttaagaggggcctgaatgtggttaacatggtgacagatatggatcttggttgggcacagcctgcaaattccaattaatctaatcccccgccttgggaaatctgaacattgcgttgagcttgaactctactgtagggctcagggcccaatctgttacatcgctctgcaggcatcccgtgctctgtctccttggtcagctcttctagaggacggtatctgccagggctcccccagggcctgagctccctgagcaagggagaggaggagagaggaactgggaaggtcttgagtagggaggttcaaggtaaaactagccacaggacaaaaacttcttccctccttttctccctccttccttcccttcccctctctctcttttcctcttttcatttccttcccaccttttccttcttttgctttttctccgtttctctctttcccttttttacttcccttattgtctctctgtagccgaagaatgcaagaccattttgttttcatgccacgaagtgagtacatgaacatttggaaagtaggtctcacctgggcttgcctccacccggaacaactctggacacatagtaagttttcagaagcagtcagatggaatcatcctggacattggtgcagcttctgaacctttcctggtgtgagtccaagttatggcaatggaattctacccaggaagggaagcagcaaacctgagtagtgcccacctttgcgggggaaatggcaggttcctccctctccagtgatgggggctcagcctgcagggaacctttcttcccagccagccttggaactcagtgctgtcaggcttgctgatgacatcactggccttccgtgggacagctgcagccagcatcaggacactccagaaatgccagcagtaattggaaacttcatgttcagatgctttccacagcattcacgcatggcgagaagtgcttctgccgagggacttttcaggtggtgccccgagcaggatccctgggagaccagggagatcagaagccaacttccatgtttcctggaccaaggatcctgggggatgggatggggggacattccccagagggctgcagctttctgtcaatgggatttcatttgggttggtctccagagagcccacagggtaaatttctaggcattaatttccaaagcctatttttgctattccacttaaagaatatttccatctttccttgcctatcactgctgcctgatcttgtttgtgcagtaggtgaatagaagagaaataagaggagagaaaaacatgaagattttaggggagagaatattccgtggaggcacagcaactgcctttgcatttctgatggtctgtaaagcgaggaggcactggcttgttctgtgtgtccctggtgagagcgttagggctgtggggaggtgcattcatgtggggatctcagggggatggggtgggaggctcacatttgacacctcctgtgggatagctgcagtgctagggtttgcgtctccagatgttagaggcagtaactgctagcctggtgcccatcacagataccagttactaaccacttatcttgtgccaagtactaagcactgcaccagatcaactcatttccttcttacaactaccctcttgggtgggaactatctctgacatcattttacaggtggaagagagtgactgggaagagcacagctgcttaaggtcacacagtgcgttggtggcagggcctgccctggaaccgaggctgcccatcaccaggctcctgtccccagctcttcagcaccaggatctgtttctcaatcatgtctgagctgtgtgttgaatgcactggtcctgtcttccacatttttttcctctaccttctttttatcatcatcttaactgtcatattaacatactaccttataaaagtgttgaaaagatagcaatttgggaaaatgtgctcagaagtaaaagctctctccctgtttccccgcccgctgctgcatcactgtgcttcctttaagggagtgcttaccatccgcgttgtcctctaaaacgggaatgggagggaatccctggaatccctggaatccctgagcctggagggattcacaaggggaaggtaaccacttgcaggaggccagtgctgggtgcaaggcaggaggactaggggacacttaaggtccagcctaaagaggacagtcactgagagtggcccttgatggggcttccactgggacagagatgggtgctcccagagggcgatttggccgagaggcagtggcttcccttctcaccgtctgcctgactcattgcccttgcctcctggccactctgccagctttccttcaccccctgctgcatatcctgcatgcagctgcccaattaagctccccaaatactgatttcatgatgtcactgactcctctgaactccttttacctccctttgtgatcagaagcctgaacttctgaactcctctactcctaagccaaagagtccgccctctgaccccagcttgtcttccctctgctatctgggagtctctcctcttttccacttagttgagttcctggttagttcaaggctccattcattctttctttcacctagatgccaggaggaagctgcgaaggctgagacataaagacatgtcacctgccctcaaagagcgcttggtcttgggaaggggcatgcatgaaatcaccttttttacatttaaatttaaatttatttttgagacagagtcttgctctgttgcccaggctggagtacagtggtgtgatcttggttcacttcaatctttgcctcccaggttcaagtgattcttctgtctcagcctccagagtagttgggattacaggcatgtgccacctgtaaaaaaaatacctggctaatttttgtatttttagtagagatggggtttcaccatattgcccaggctggtcttgaactcctgacctcaagtgatctgtccgcctcggcctcccaaagtgctcgtgttacaggcatgagccaccatgcctggccatgaaatcacctttgatcagcgtggtgagagccacttcaggctgcatacaaagccttcctcttgcaggaagcctttattgattgcactgtcactgtgaattcactcttctctggaggctggtgaatcctcatctctgttcttctctttttgttccttgttttctgcccggtataattcactttcttttattgccaatatctcttggactttagccccaaggaacataccacactgcctggcactgtgccatgtgcctaataataaggaggtacatttatattgagctctgattctgaagcctgttcacatctgtgattccccttactttgcataacagctctctgggacaggtgggacaaatgtgataagccccagtctgcagagcaagagacgacttgcttatgggcacacagttcataagtggcagagccgggaccagggactggagtcttgccgtgggtgtgctacgcggccccacagaaggatggatgcatggagtcccattttgtggactcccccctgggcctgcaatgtgtagggatgtgttaggggaggatgagagggcaagagggggatctgtggctagaattccggaggttcgttggaaccagggaggtacatggggtgacttgaaccccaaatcttttcatctaggcatgacactccctttttcctctatggagactgggaatagcaggatggagggagggtagaaggagtagaggagtcagtgttggggctagggctgggagggacggggtagaagagagcaagttctggggacagagggcagtcaggagacctgtcagttctctctgggtagcctggactctcgagaggactgaaatgcatcaaaggatgggtaatgaaaaaatggtgatgaggacgggttgccttatcacccagaagggaggaaaagcttcaggcccaaccatcctgcttaaacatttgagaattctatgcggttcttttaagtatttagaggtactggggacaatgtgtccagaaagtggaatcccagctccttctcaccccggctattgatttttggccttgcaattactgcagaggtgctgcctctgtgaacactattagtgctagttggaaagcttgagcttttgaagcttagctgtttgagctacctacgggtttggaaaaaaaaagaatcttaccatgtgtttctttagcctgggcatgaatcaaaaatagttgaacttttttttttttgctcaagtctcaagtttaaaaataaaaaagtcacctttgggctgagatcaagaatggaaaatttcagggcatagcgtaattttttccccatctgttctgggcaagggatgataaagcattctgttggaagattgtgtgtaagcatcaaccatgagtctcactactttattgcgttgcaatgtctactttgttaagatgtcttgaaagaaagacttcttccatcctcctggcacaactgaatgtgcttggtatggggagacgtgtctaactgaatctaagcaactaattggaataggcaaaggaggaagtgatgaaagtgaagctgcagtttctgcaaaggtggctttattgtataaggtgcaggttattaccccaaatgatcaattactaaagttctggattgggcagtgacaagtgtctagagggaatgctgggcctagggaattgcattgtcatgtgagaataaggctggggccacctttacattttcattaaaaaaagatctggacagtacttgactgtggtagtagactttgtaaaggttattatggttacagctttgtttgcttgagatcctctatttttatagttcaatattattaaggtatgaagaaactgttttatggatgtcagttttactgtttctgacaacagcttgcgaggaagtatacatttgtgcaacagaccgctttggatgttaattctaaatttagaagccgccttcaatgggtgtggaaatcagttacacaaaattcaggtgcttactaaaaaaaatctgaatatccatgaagcttgtatggtccctggtggaactttgagcagctgagcctctctgaagatcctgaggttgtcagggtgtggcacagcagctgggggctgggccccgtgcatgcacatcagcatctgtgtattgaatataatcagcacagatagggaagaaacaaaccaccaccaccaaacaccctaagtaccaatctgggcatctgggcaccctggattttcattttgactctgtcatttactagttctctgaccttgggcaccatgctttgcatagcagccttggtttcctcattggtaaaatgaggctgttgaattctatatggctcaagagttctttccagccccgaaacatgcaaaaattcagtttcgactaagagctttagcactgtcttatcttggctgtttgcagtggccaaaattgataacatattggaaaacttccctgctgattaaaatagacattgccctaagtgctgtgagtgtccctgttaccttatcccttctctgaaaccctctgggtttccccttgaagcagcccctaaaatggctcagtttccagcatagcaggaggtctccagcctagccaatggtgccccttgtgaaggtcatggacctgccttacccattgttaaatgttttccatccctctggtgtacgtggagagcttctgggtggagtggacacaaatgatttaactttcccgagtctctgcttctgcgccagaaagtggaaggaatcataaccagtgtagtggaggtaattaggagggtccaaagcttggaccatctgggttcaaaccctggccccaccacttagtatctatgtgagtgtgggcatgtcaggtagcctttcttacctcaattcataatccgcaaagtggggatgagaatagcaccaactgtatcaagctgatgatgagatcaaataacacacaaaattcttagaatagaataagcactgtagaagtgatagctctgtgtatgtcattaatacattcactggtatcactgaactttattttatatcaagtgagataactactataccatccagggagataatgtgtgtgaagcccatagcacaatgcttgacaaatagttttcagggaatgttagcttctatctaagcaggtcccattggaaaaaaaaaaagttgtatttttatatagttctagttagtttctcatctgtgatctatgctatttttaattgaaaaaaaaaagtgtttccatacattgtcaggaggagccgttcccctgtcccagcctctcacaaagcacaccctcactccctcatttttccagtagtcccagggctagaccacctgtagagacaggaagcctgcctaaagagcagaagcatctgctcagaaagatctagttgtttgctggagcctcagcttgaagaaggctccaagtttattataaagtcccagccacacagtttgcttgagactttataaagagagaatgagatgtagaggctgggcccaaacccactaccaggctgtgggaatgggggatggggtgcttggctggcatctcttctcagggcctcctggtcagcctcaggagatctagtgctaagggttactctgctggggaaaatctcaatggcactagagaccacttgagcacagctcttaggaactgaggagccagctacttagcatcccagaatcccaatgcccatggccagagccagagctgcttagaagaaaagcaaagtccgcaggctgcatggactgagaaccacctcacctggctgcacattctctgagtggccttgaccatgctgttctctgagcctcagtttcctcatcaatgatagagtggagttagctagatcaggggctttcaaaagctttttcccctgaaacccagaataagaaataccttttctttctcaacccaatacttatgttcatgtatgtaattaaacaaaagttccatgcagcaacccttttaatatgcagtactctgttttctgtgctgttgtttcagttgaaaaatgctgattgtgaatgattcagttgattctgtgacctgctgatgggtcataacctgcagggtttttgttttattttgttttgtttttgttgacagagtctcgcactgtcacccaggctggagtgcagtagcgcgatcttggctcactgcagcctccacctccagggttcaagtaattctcctgcctcagcctcctgagtagctgagattacaggcacccgccaccacgcctggctgattttttttttttgtatttttagtagagacagggtttcaccatgttggtcaggctgatcttaaactcctgacctcgtgatccacctgcttcagcctcccaaagtgctgggattataggtgtgagccaccatgcctggccataacctgcagttttaaacatatcgggctgaatatagttgagggtgcttaaatgctatgatgctgtgattcagctgggccaggaatatagagaacagtggcaccctactctgtgttgggccagagattgctgaaatgtctagcatattagatcaaccagatttttagttctaaaggtgaaaccagaagcatttttttttcctctcaaaaacacacatagactcagaggtatggatacaatacctgaagggctatagttctttttccaggattgtccctctcagcaggaatggaggatccctagctagagaggagagctgggggtgacaccttcttgcccagtggaggacagctggtggtgtggcctcaacaggttcttaggaaggtgagttccttagcctttctactagtgaggtgtttgggttaaggtgcagcaccattgactgggcccgtgtggggaggatattcaaagcatttcacaattacacagctgcctgggcaccgacagagtcctagagaagtgtcgactgtgccaggtccaacccttcagtcgctggatcatggggaggcatggagtcccattgtagaggctgggtggtggtagtaggcatgcaggaattcagggaagctgctacttaccaccatgtaaaaaggatttcaatattttcaccctggtagggatgcaccagtgtgtgcttctcagcctcagtcctggacgtatgccccattgccctaaggttgtcccaaagaggccaccattagacctcaccttttatggacaggtgggagatgtctgaacacaaccacatgttgcccagtgacaggggctgggctgaccaggacacggagagtgacttgccttctggggctgagccagtcactcatactcccagcgtagccctggagcttcactgcaactgctatgttacaggaagttgtaccagcagctctacactaaggtgtatagtcggtgaccactttaaagaaagactcattagaaagaggcattgtttggggaggccaacaggccagctgttggggaccatgccagaggtactgtgtcaaggtacctggcttgatgcttacttcccattgtctgtttcttgagtttattttgcgccatctgccttcttccacctgatttggaattccaggactgctgtgtaggcttctcttcagatgagatgcagcagtgttctcaactggcaggggcagctttcttgggggcagggactgggcatctgtgttatctatcctgggcccatctgtttctttccccttgacacccaccacaggggtctgtgtacaagagggttggttgataccagttttaatgagggaacctatcttcttggaaccatccagaagctgtggtctttttccctggaacaccccacccccgacatcccagtgctggattcaagctggtgaaccacaggtcaaaattttcagttgctgtcttccagggccttggttgttccattgtcccctctccctgtaccaggatcatcgtgatccaatggatttgatggagttgctacacccagcttggcgtgcagaggtgtttggcacatccctgcctgtggaattctacgctctaagggagatgctgccagggtattacctgattcacgaggcatgtcctaccatctgtgttatattttttttaagatcagaattatgaatatttcaggagtcatctgggatctgaagaagcaagaacccactttctgagtcttttccttaaccattcatagggggtaagaaatgtcacaggtttgttgtgaaggtcaaatgaaagagaacttgagaaaatttgcaaatccttcagttcaaggtgaaagaaggtaatttattattaattcatattgttattatgtagcatttcttagaatatgtataccaaatgccttttttgactggtgcaatctttctataattccattctgggatgttagcttatttgcttagagaatggtgtaaagaggggagcccgaggccggcagatcacctgaggtcaggagttcaagactagcctggctaacatggtgaaaccctgtctctactaaaaatacaaaaattagccaggtatggtggcgggcacctgtaatcctggctactagggaggctgaggcagaattgcttgaacccaggaggcggaggttgcattgagctgagatcatgccattgcattccactctagcctgggtgacaagaacgaaattccatgcaaaaaaaaaaaaaaaaaaaatcacttcctgggcagtctgaatttcttaacctgccccagagagcttaaaaactttagaaaatgtggaggatccactttttaaaaaaatatatatatcctctgttcatttctggaagccctaaggaggatgagagttacattctctgtcactgcccaagattctctcatgaactgtataaacagtgttgaactacatgcttgtctcataaacccagttgggcaaatattataggcctatttctgtcacctctggctggtggagtgtttgtatttgtccacacatcctttatgcccagggcacgccctggataggagaagcttgtgccctcccagatggaaaatgcccataactcatcagcccaacattggactgctaattgtaggcctggattcatagtgttcttgaaagcttcagggtgagattaaactgccttttgacagtgattgacagctttcaagattgaaataatgagcctggagcccccattccctgcaaaccactctggagttaatttccttgcattcttcctaccttccagaaacctgactcctgtgcagctctgtgttcaatggatgtcacatctatcttttgctcttttgccaaaattaattgccagcattatccaagggagtctcaaaccaatcaggtcttgcagctagaggatcatcaatataatacatgctctattgcctcagtgactttcagtctctgccctggcaggggtcctaggagattggtttgaggcattgcagtttgattgtgcttgtgattgatgggccggaggctggagctgaggaaatgccccaaggattacattttcttagggtgtttttgactcacaggtgtgcaccaccatggaatgactattgtgtgcggagggaagatggttccctggagttgggcatcaggcacttggttgggatgctcatgacccagggatccacgctcatcttgatcctcagttctgggtgtgtctgggccatatttccagagtcctggcttccaccagatgcagcataatcacggttttgaaagcataaagagtccttattgtactgtatcctggtcttcatcatcatcacttccatagactgcactttacagggcatagaattcccttttttttttttttttttttttttgagatagtcccactctgttgtccaggctggagtgcagtggtgtgatctcggcttaccacaacctctgcctaccaggctcaagcaattctcctgcctcagcctcccgagtaactaggattacaggcacatgctactatgcctggctagtttttgtattttcagcagagatggggtttcaccatgttggccaggctggtctcgaactcctaaactcaaatgatccacctgcctcggcctcccaaagtgctgggattacagcatgagccaccgcgcctgaccctgaattgacttttaattcctcgcaattactttgagaactataataccatttttaaaggtgaagacacaggctcagagagattgggtaatttgcccatggttcctctgatggtaactggcagaaaggggaactgaccggaaatccaagcccaagctatttctctctgtccacaccatatgtcagctgtgtcgattcttatgccatcctctttgaaaagaactcagagtgcttttgaaaacccacattttgcaattgctgctttatagagtgtcaatgtttgtctaagttaattctcaggtagtgacgatcaaagatgtaacagttcatccagggtttacctagttaattccagcacagaaccagaaacaagatttctggcctctctagcactaacctctccagatgccttccatgaggcatatgtgtgtgctagaggcatggaggagctaagtttgggtctctgtactgttcccttctcatctgtttaacctccaaagtattgtaccatgttctctgtgtccagtggaaaatgatgtttttacattgcatcatctgtcattcttaaccccagagtggggctggagtgttggaacacttcagcacaggactctgtttaaagctgtgagaagctctttttgtttttctaagtcggctgaactagtaaaacagttttacaactgtgttttcaagttctgttcagaaagacaagcttgaaaaaataggtgatgctgaagtgtcattttagtaaattttttttccctgttagaagagaggttggctcttccttgattctaatctttaggttatttctccaagagctacctttctgttttttttctttctgccccatgaggtcttcagtcctggatactctcatcctataatagccagaaatgacccttgatccatggagtttgacttgggctgaaatcaagtttcaagaaataccacagggccttgtgactttgtcacatgtcaccctggcctgtgagggggccgtctgactcccgccctgaagtgtatcagtcacatgcccttgtttgtctgccccctccccagctccccagcccacctccctatgtcagtgtcctctttcttaaatctgcactggactggggaagttcttcatctgatgcgttttcctgtggtgtgcgtgcgtgtgtgtatgtggtaagagtgaagagatgatcaaggaagattgaggcagctcgaatttcattatgaacggttcttctgagaagagaagtcactttcatattatgagaaaagttaggaagaggtcaatgccaacctgcacccctctgtgattggctatccccttcacctgccttgtgtaatgttgccccctttccctaagacccccaggagggcctagtttgagaaaatgggccgtaatggttgactgtgcccgagagatcaggctcttccatgtgcggaggagtctttggagatggcaccgtttccaggaacaggaaggccttggaaagtttgtgggctccttgggcagaggcaaagtttcttttggactcttccttagtcttcctcatttccaaatttcaaaagtgttttctctttctctttctttcttttcttttctttctttctttttttttttttttttttttgagatggagtattactcttgtcacccagactggagtgcagtggtgcaatctcggctcactgcaacctctgcgtcccaggttcaagtgattctcctgccttagcctcctgagtagctgggattataggtgcacactagcacgctcagctaatttttgtattttagtagagaggaggttttaccatgttggccaggctggtcttaaaactcctgacctcaagtgagctgcctgccttgttctcccaaagtgctgggattataggtgtgagccaccacacccagcccaaaagtaatttctttggactcttccttacctcatcagagaggagctgctactttgttgccacagactgtcctcagagagcctttgatcctgtctctgctgttccctgtgctgcaacctgggctttcagcaggcgaaagacacagcagacctgcccatagctgtgggcagtccggcttggcttgttaccaagagatttactcagcttgctttgaagagcttgtgtcgcccagtgaggaaccctgtgggcttctccttccactctgtgttgccagtggcctacatctgagctgcccatcgtagccacagtatcatctgttggaaccttaaaaaaaaaaaaagtcgatccctgctcaagacctacaaaactggaatatccaggagtggaatatcaaatctgtgttattgaacccagatccacagggagttctgatgctcttctaggttttagaaccatgtctgtttactcatttactagccaatggggaagctgggaggaggggcaagatgacacttgggtggggccttctgtccttttggttaccttgagcatagctcctggccttcctggtgaaacagcctgctgctgaccttgaacctggggtgggttcagcaggaccctctagtccctgatggggcatcccctgggagtaggcttgaagtagaagcagctttctgggtgtgggatgcccctgagacatagcaggtgggctcactgctgagtaactagaggtgcccaggccctgactgggtgtgcattatggaggaacagcttggtgcactgcctgcagggttgcctggtgactgcccagcaggagggaggcgagggcacttcttgggctggtgctcactgctgacccagtggagggaacattcatctcactagaggagtgtcaacggcgcctggttcctgccttctcagctcccaagtgcccctttccttgctgcagcaggagaggagacttggccaatgggggaagagtcatttatccatgagctccaattcaggaacatttgaaatattgacaggctgccttttaaaacatttacaacaaaaatagttttatggagtcccacgggggaaaaaaaagaagaaaaagttatatttctgatttcactcaataaaggaatgatactgagaatatcagctttgttatttcatcactaaaatgttaatgtctgtgctgtttgggaagttgcaatgcagaggcagctttctccccgcctccccaccccgccacccggcgtttttttgttttgttttgttttttgtttttttgagacagggtcttgctctggggtacagtggtgcaatctcagctcactgcaacctccacctcctgggttcaagcgattctcatgccccagcctccccagtagctgggactacaggtgtgcaccaccatgcctggctaatttttgtatttttagtggagacagggtttcaccatgttggccaggctggtcttcaactcctggcctcaagtgatcggcctgcctcagcctcccaaagtgctgagattacaggcgtgagccactgcgcctggctaacctttttggattcttaaatgtgttcatgggctgcatcaggaagccaggccaccgctggtccctaggtctggggtgttcacaagaaaagaagatcataaacatcatgtcaaaggcaggaaaaacaaaactctgccctctgtggtattaagtcccagtacttgaaattccaaatgtccaaaggggagcagagagcagcacacacatgtatcagttgcttgtccacctggtagttgagtgccttcactgggtatgtgtggtagctacagcctagacagtactgctctatgctgggcactgtgctaagtgcttgccctatattaacccttttagtcttccctacatccctgaaatgtgtttatgcacttcttgttcctgttttcatatgaggaagcagacccagaggatgaagtaatcttatcgaggtcacacagctgggaaatggagaaattaagattcaaaccagacaggcatcctccagagctaatggtttaatccaggcactgagttgccttttcccaaagtagaggataagtcagtcaggcagccacggccctcagggtacctccagcacacctcatgctgggcccctttgtagtggctgggctctccccttgaagagttttctccatctcttggtctacaatctagcttcccagccttctgcaaccaaatcctttccttactggtcagaaatgcctggaaattgcagattagttcagggagatttttcccaccatgggtcagagagatttttcccaccatggctcagagaggtctgagcctctctgtcactgacatttgacctcatcctcgtcacttctggccttccagtggggctggtctgttctaaccatctgtaagcttagaactgtacggtcccctttgtggaaatctgcttccaagagtggtccctggaaggagaaggtgacttctacatctgtcctctggttgatggcttgaatagatgtgctggccaggttggattggaaggtctcagtcttcccagcaagctccacacacaccatgcttaggggaaagaggctcttccttgatggctccaggctgcagcatcagtcgaatcctagctagaattttgaagcatcattgtgctcatcagaaatatttaattaaggctgcatattaacagtgtgtttttccaggccctaggcaggaccagtttagttggaaacggttcctggccacatggagagcagtgcctcagattggaggtggaaagagcatcaactgtggggcacagggatttgggatccagtctgtttctgctcttctttctataggtctgagttttctcatcagtaaaatgaagccattagaaagttggagcttttgagatttttgctgggtatacatttgtccagaagtatcttcccaccatggctcagggggtctgtgcctctgtctgtgacatatgatgaatttttaaaattggatacacagaattctctagggagagagaagaatgaaggtaaatgagcccttcctctgtccttcccctgtacatataagagcataatttaaagtcacccactttaagtacaatatttacttaaacttgcataggtttttcctgtcactccatgatacatgttttatttaatataaaaatagtggtagctgggtgtggtggcgtgttcctgtagttccagctactcgggaggatgaggtgggaggatcacttgagcctaggagtttgagagcaacctgggcaacatagcaagaccctgtttctacaaaaaaataaataggaatagcgttcttcccacatctctgaatcagttgaatactctatgagtgtgtcccctgagtgggctttgtatgcccctgactccaaaatcttggttggagtcttacatctgggaggtgaagcttgagggctagggcccatgtactgcttgggttgtggggggaaatgtataaaaatagccccccacctggacaacctcagagtcttattttcacactgcttctagcatctgccttcatggacctaacaattatgtcaacatcctaccttgaaaatgctccacttctgaagatgtgcttcgagggagtacacacaatccttgccactcccccaagccttgcttctgcccagacgcggcctggttccctggggagaggcatgcctgagtctgccgagacgcctgctccagaatgttttcagggcccgttccagctcttaggttctgtggatctacgtgagatcacaaagctgagacaggcacactgacaactgggtagatggcacaacagtaagttaatccaggagataaaagagaaagcgagacaggaaagaatagggtgaaatcccagagggagcgccagggcccctgggacttccagttgcttccagcggcagaaagaggacagctccagctgctacagcacctcccaggaccaaacatggggaagtctacccagcaggtgctgggagagaggcagccccaaccagagccaatatcagatgggagttcctaggggaagatgatcccactgggcttgggagtaggctgggatccctctcttctccaacccttcactctcccatccagtgcgctcctgtctcttccttctcttcttttctcctttgctctgacttggtcctggtggtgaaggaccagatgtgagcatcactgcctggcttgggagaatctcttgggtggctgggctgggggtgcgtgcacaatgctgaatcttactccatttgttttcaacttattcttgctcccttcttagcatcctgctcttctaaaaaggaaactgtgatttccctgaataaactagtgctttcattgtccagcattggcaaggaggaaaatgctctgagagggcaaaaagtagttggatgaccctgactctctccagcttcaccttcctttgggagaatttctcacgtatttagtacgaacacctacatactagttttaaggtggtgccattttcctctaactgtggtgggccaagcttgggtgcatgactttctaacctttcgctaattgtctatgttgcgttgagagtctggtgggatgtttagacaggacgttactgaaaatgtggagacagaaaaaaggaaatgaatggaggctgacagagctagataactgccctgtagggcatagctcatcttagctcacagaccctgccagagtcctcatttttttggccttcttcatgggctgggttcgctcttctcactgcagcccacaactggttatccacccttctaaaaatcccctgctaggagagttcagcccaaagaggcagataggaggatcacctcttccaaggagtttaaggcctctcttctgggtgctactttcctgttagatgctttccttttctgtgatgattgaactagggaaggagaacttcccttccccatctagggagagagacttcctctccatctgaagggtcctggccttactcctcaagataatggagaagaatttaatatagtaaattcaacatctccagccagtatgggagatatcataagggacaggacacatatttcctttttagctccagtgctccaggcctcagcttccttgtttgtggagtatgcatatttagagttcctacttcagtgttgaggactctctgtgatggtgaggttaatacatacaaggcatttagaatagttcccaatgaatgacttttatcagtgatgtgttcccagcaggtctgctcagtgtgtgagtctagtccatgaatggcccagagtgggaagatagcatcaccatccacgactcaagtgaagcacatcatgatttttcaaagtattcatctatgcatcccttattagtttccataccaaccccagagtgtaagctccacaaggcagggaatttgtccatcttgattgccactatatcccaagtgcttagcataatgtctgactcatagtagatgcccaataattacttgttgcatgactgagctctgtgagttagatggagtgggtagtattaatccatttgacagaagaagaaagtgagtcccagagacatgatatgactcttctaaggttgcatcaggagttagccacagagctggggcaagaccctgagtctcctcagtcctgatgcagtgctccatccccagtgtgctgttagatctatcaagagttgtgcctgctggtaggttggaagcagggaataaaccctgagctgccaccaggtcagcttcatggattccattgaccctgcttctctgggcctctgtgcacacctacatgtgtacatgctgggagtcagaggctgtagagactgtagactagtggcatctgctacatgaaatcctgccaagggacagctttggagaagccttctgtctgcccctgagctaagtgggggtggaacatctgaccacatgccctcttgcaccaggcgttgtccacgttaggcttccaagtgttgggcgtggttgcagggtaaggctgcatgattgcaccaggcatgttggtttggcctccctgaggtggtgcacagattgcctttctgtaaataggatgtctgtcacctgaggcatttgtaccaggcacctcattccttttttggcttcctgtggatttggaaggaaactcaggggccattttttttcatccttttccctccatataagactataccaaatatattccagagatattatttgctcttaaaaaggctcaagaaataggcctaactacatctgaaagtttttctaaatcaagggttggcaattttttttttttaatttgtaaaaggccagataatagagattttaggcttttctgggccatgctgttgcagccactcaactatgcctttgtagcatgaaatcagccacagacaccccagaacagatgagcatggctgtgtgccaataaaactttatttataaaaataggcatcgggctggattgggcccttaggctgttggtttgctgactcctgttgtaaatggttatctttgggtcagcccatctttggtcttgctagtcttgggtgctgcttgagtcagataatccaagagaaataaaattccatgttgactcctctccttagcctctgcttcaaaacctttttaagagaatatttactcaagaaagagcttggaaggtcctggaaacatgtgcctttcatgcagatgccttactgcatggagaaaagcaggctttcaccccaaatttctgttgatctggagaagccacacagaggtgggcccggttgggcagcctgtcttgggtgagtttgggttactgtaaaagctcagacacttgggttcttggctctgtatgccctccctccctgtcttcctaaagccaagaaaaatgaaaggcgagggctgtctgaactagggtgtgatatttaagtcttagtgggtaggttgaaatataacggagccgttctgttcattgagccaagcctgtggactccttaataatccatggtcgggattgcagccctgtggggaggcagtgggagccttcagcagcttgaaagtagatgtctggattccaggaggtacaagcttccaagaaggaaattttcgtagctcatctttgcacaggaaggttttaatggaaatttgaacactcctagtaaacacccttgctattagcatctttcattttgacagaggagttttcttcctctgttctgatgggttatccaggctgggctgggttcctgtgtggagttatgggctctctttagggaaacatttggtgtggtagaaagatcttggtttctggaatgagatttgtgtcttgaccatgtgccattaattgtaggtaagatcctcaggcaaagtctttgacttctctgagctttgggtctcactgttgctgggtgatggaatgagagtgggtttacaaagcaccaagcacagagcccgacacatagtaggtagcctagaagggaaaacagaactccagttgctaatgcccaggtctgccccgccatctttggggctgggttatctgtgtgctcccctgacagggagccacccaggattcactttcaaagatgggaaaggaggcctgaaggggacatgctaccacggagtgagcaggcattcctaagagtcggtctgtcctttcctctcccactggagatactcagccagtgtgggggccatgcagcaccggggaagggacacatgtctgggaatattggggataaccttgtgtgaaatttttcagaacaggccggcagtggcctgggacatggatagctcaggctgcctgctttgctcctgtgcttgtcctcgtgacttagattcttcaagatggaggggctccctggctggtcccctacacaaggcccctatatctgtgctgggtggtggttctgatccctttttccctgtgggggtggatcagagcttcctgtggcttctcggtggggctggagggccctagcacactgtgaactagtgggaggcagtgagctgggaattcagtggaggagggagagggaataggaggaggatgaggaggaagaggaggaggcagttgagacagttctctcacttatgcagaaagtgtgtgatgaaagtgtgtgatcacagccagccccacacagactttcctccaaatgagaagggagtgagaaaatgtaattttagtgtctggcttttgactgactccctgtggaggttccttctgggctgtggtgttgggtgtctctccttccctccaagggacagccaggcctgggcctggaataagtgagttcagatggtaactggggaatggccatagggagggagtgaagagccgtgcctgtgccccagggggctggggggcttggatttcaggacatcagggaggtgacatcaaggacactgcaggggggatttagggacagggtagtggggtcagtgcctgactcagtccgagctgagctatattgggtctctgttcctacgctgaggcatgctttcccaggcgtgaggccatgttttccaggccacagtccacagcctcgctgccaacacaggtgtgcattttggtggaggcttgctaccctctgtgtgaaaccaagggagcagaatatttccctgaaatcggggctcctggaacatgaccctgccaggaagctcaaagtcctgggagaatatgttccaggcagggcccggggggcacctccatgccccactgccttgtggctcctggcacaggagatgctggacagtatatactctgctggctggacaggctctcatgtctgcatgtgaaaatcaggttctggggagtttataaaccaaagaaaacccctccacccagcccacagagtgccagcgattccctcagtgattcgtgtgtggaggattcacacttggtggaaaatctacttaacatttttatcctattttccctccactcactgtcagtcctcatgtgttaggggagtggaaactcatttaaatatgagtctatgaaaaaatttaattaggaagataaattgaaaaatgcatataatacatttccgtgtcagacataaattactttatccacaccactgcacccctccagttaacccagggagttgggagttgtctgtgggatgaaaccctcttaggagattttccggaggaacccaactattaggaactccttcaaagcagaacttaaatgatagcatatagttaagtacatattagaaacttcatgattccatttaaactaatcattcagtgacttcatcgtgggtcagaaaaaatatgctctcttctcggtacattttgcacctgcagaaggatcacttggggaggaagaagatggggtagatgagggtcacatgatttttgtcttcctatgttggaagacaatgcttatggaaggggattagactttttgctgtgtccccagggagcagagtcagtgccattggttagaagttatagaaaagtggatttggggtcaatatgatgcaatactttctagcaaagaattttggttaaaaacacaggctttgtattcaaccacaatgaaaagctgaagcccagctctgcaaactactagctgggggacctcaggaaaatttacttctctgggcttcagtctcttcaacaggaagacgggcaaaactatagtgaaacctcataccttcatagagttgctctgaagatttaaagaatacgcttagctcacagttagggaaattcagtgaaaggtggatattattactagaagatagggtagcagtagaaagaaaatttgtggtcctgtaaaattgaagttgccctgcagtgggatggggcatatgaggatagtgagtgcttcatcatcactggagattttgacagcagcttggtgtgtggcttcttctcaggagtgatttttggagattcaggaatcagattcctgggctagatgccgtgctcttcaagtttagctgtgaccctctcaaccacttgggaattttttcctttaaacaattataacaattgtttttgaaaatatcaaagttcagagaagaaatttaaaaattactcaaaaatctcacttcctagacataaccatcatgaacattaagaaaactcacgtaatctctctatcatcacacacacacacacacacacacacacacacacacacacagctggaaagatatgtagatcacagattgacaggaataattttagaataatgggatcacactctacatcccaattttaacaaagagtattaacgtacatggcttaaatttctaagaggaaacaagtacatctaaaggaagttctgagttctggaaaaatatgtcttcattgaaatggatatcttttagaagagctcatcaaggttatgaaaaattttaagaagatggagtcattgctttctgttaatacctagtttcaattttagacttttgagcccatgttataaatgatgaaaaaattagcaatcacctgcttcttcctacctcctaccccctttcttattttaattatagcttatttttacattgttaaggctgataatatctaacaagtccctgagttgtttagtctcaagcatgtcccctacgtaggaattcaatttccagttgtattctttctgttctagtttactcgacaatctaaaatgggattattttggtctttgatttgttttctttgacctgctaacttttctgaattcattgaatatatgtttttgttaatttcttctatagcattaaacatttgcaggaattttctttgtttctttggttatgttttcttctagagaggttcttcatcatcataatagcacaatatgctattatgttccttattttcctcctgtagtgtgtgttcacaagtgccatattttttttatcttgcatatgtttaacttgggtagctctgtccacttcttctaatcactctgatattgagggcaaattctttaggactccttttgtgacttacctgaaacctctgccatggtgtcagctccagtttgagatgctttctgatgcctgggagcattataggggaacatgggagatgagggtggtcagactcagagctgtgtgctcctttgggtaggaccacatttaactcttgcatgactttgttaaatgtgctgttccagggctcattccactaatgaggggatataggaggggatgtccttgccatttagatgatcccctcaattaagcgttgagccctggaacctgtgtttctgtgagagaaagagagagagaatgagagagagagaaagagagagagaatgagagagagagaaagagagagagtcttgattgttcatgctgctgttttatagctctttttctaatagttctcaatctgtttccccaactctctccgtattaagtcagaaaagaggaagaaatgatgtcacactcacagtctgcttctctgcaaatatatagtaattagtgagaagtctaaagattttggcctcagcaataatacttctgaagcatggggtggggttaggaacctgacaacttctgccaaatcctgttcctgcccccaccctcaccccaggtcttttagatgttgatagtatgagtgtgtgccagttccttgtttgattgctgcttgcttttctccttcacttattggtttttgtttttttgttttgctttgtctgattatgtattgggacactctgccatctttctccaaaagcctccctgcgtatcttttaaaaaaatacaatttcctaggctcaacacagagctatagaattagattcccttaggggagggccacagaaatttatatttttataaaacttccaaggcgttctaacaatcagccaagtctgggatccattttaagtttcccctaagattctttccagtgctgagattctgtggttcattgtgttctctttaagaaacagggagggggtgttagcacagggattctgtcatattctcaggcatggcatcctctcactatgcagaagaagggcttatgtctctctttatgccaattcttccttttgtcttggtccatttgggttgatataataaaaatgccttgcactgggtgatttgcaaacagtagaaatttatttctcacaattctggaggatgggaagtccaagatcaaggtgcttgtggtttttggtaagagcccacttcctgcttcatacatggagccttctgtgtcctcacatgatggaagggaccaggcagctctctgggacctcttttatagagcagtaatcccacttataagggttaaaattgctacatataaatttttggggagggacacaaatattcaaaccattgcaaagggataaggttggaggatcttctcatttctctttgtcacaatgacctaaagataccctccatgttttagcaaacttgcccttgagttagtgaatggataagttgttctcaactctggctgcacattaaaatcactttggaagcttttaaaatattgatgcctgggcctcacccctaggcatgtggagttaattggtctagggtagggccaaatcactggccttttctttgagttccctaggtgttctatctagcgtgcttccaagactgagaaccagtagattgttctttcttatttttttagtgactcatgatccattctccattttccttactcctatctcaagccttgattttggaacatgtactttctacacactgaatagtttctaaggtaatgttacttagaacaatagagtcacgtagtttcaagaatgggctttggagtaatagaaatccaagtgtgggtcctttttctgcccctgctgcttgtgtgagcttgaacaagtaacctaacttctctatttcacagtctcatgcaaaatagggattttaattctaccttgcattgttttgaggaacaaaattagtttcatatcatattaattacatgttacactagttttcttgtgggtagagtttttctgacatattattttttgtctttttattgtcaatcttttaataaggcttttctatatgtttcttacaatcatcaaataattgaattttgtttaatgttttcatctggtttgataatctctgtcttttaataggtacgtttaattcgtttatacttaatatactcactgatacaatatgtgagttttttctgctgttttattttgggtttctttgctcctctttccccctttcctgtcttatattaaaggaattgttccatatttcttctttttttaaattttgttggttcataagctgtagatcatattctgttctcctagtgattactctttttttttttgagaggaagtcttgctctattgcccaagctggagtgcagtggtgcgatcttggctcactgcgatctctgcctcctgggttcaagcgattctcctgcctcagcctcctgagtagttgggattacaggcgtgcaccaccacactcagctattttttttgtgtatttttagtagagttggggtttcgccctgttgaccaggctggtctccaactcctgacctcaggggatcagcccacctcggcctcccgaagtgctgggattacaggcatgagccaccatgcccagccttctcctagtgattactcttaaatttttgagatacattttcataattctgggaacattgaaagtgataacagtatttttactcaaataatgtattcaaaatattcagcacaatgcctgacagtcattaaaatgcataataaattccaattgctagtgctagtcttactactgccagcactacaattaatattaccatttttacccaaagagccactaagtattatttttatccataagtatggtatcaagaagatgaacattgtgaaagttatatgaacaaattatagtctgaacagtgccagtttttcccaaaggagtttgctcatttgtaaaatgttatactgattattcaatgaggtaagttctgcagagtgcttagcccacagtaggtgctcaatcactgttagcctttatatggataccaacctggacttcccttttaaaacaccccagctttgccttattgctctgcaagccagttctaggcatgtgtctctttggctgtgaccctggatccaaagcttttggggactgagtgtggatgtgactgctctgctccacctggctgggacatagcaggacaggcagcaacccaggtctgtgaaatcaatcatgatgattctgggaggaattattggtgaattagggggatgctccaagggatggtccagatggaggtaggtgtaaagtggagttttgctggaaggagttgtttttgcacaacatattgatttccttggggtgggagaaaaaagaaacagcagctcttcgctgctctcccagagtggtgggtaggagaggacaggtgggagtctgtgggcccctttagctggttatttttttagatgtaccatcaggtagctgcaactgtattcccactgcttccccagcaatgcaaagggcagattacgaagcagagctgggctggcagcaagttttgctttgctttctcccagcggccaacagcatttgcattggtgggtggtgcacacactctgcagagagagggcgatacccaagcccagggcccacagactgagcacagaacagaaaattagggctgggaattcacccgtggctcctcagtgtctgtgttgcccatctctgatagacttccaaaatagcaggggccaggaatttggtggggacacctggggatgaggggccctgccagagctgggttcattcttgagggaatgtctcccaaatctgccatttaagaggatagagtttcggtccccaagctcaattctgcctcacctccatgctccattatctgggtatccccaggccactcacttatcccacccatgtctattctcttacctgtaaaactagaattgcaggtattttagtggatacgttgttgggagatgactcataggttttgatcccatctccatctctgcattatcttggacaagcaacctgacttaggtgcttgcttgtctttaaaatgcagaacgttagtacctatcatgctagctcattgggaagttgggaatggcaaataagagaatggccttgcaggctcttgagggaacagaaaagagaaaagtgggttcctcagagacatatgctcttacctagggtgggggagctggtttatgaatggtgtaagtctcagagtctccagcttcttccctagggtcctcccggaccaaccagcctgtattggagtgtgttcagcctcttgggtagatgtaggaccgtgggtggtgacatgaaggagacaggttactgctcagcaggaggggggacctatgtacggagcctcctagcctcagaggcagctgttactatgcagagccttcatgctgagccctgtgctaaccactccacacacactgtcccctgaatcagtcttgacaaccagcccttcacaggcagggagcaatgggattagatgccttttgtggcacgagaacaggttcatagaggccctctgttgggtcagattttaactccatatccttaggttttaaggagatccatggagtctgtggcagagggaccaaggtgggggagggggtgccattgatggatcatagatgggactcaccatctagctgggctgttgaggactccatattagcctgggagtttagtactggcattctccaagacacacgtgaagaaattgaggttcagagaggtgaccttgccaaggccacacagctagtaagctgtggagctgggattctaactcagatctggttgactcagaagtccagctgggggtaatgatggcaatgaaagctctagagttggaagagacccagacaaagcgggtttggggctgcttcagcgaccaaggatcttggggagaatcctggcccacgagaccacagtggattcacctgggtgctgctggccaagagtttgagtgtgagtgtgtatgggtatgtgtagggtgtagggtatagcacatgtatgcagtgtgagtgtagagtatgtgagtgtgacagtatatgtgtgtttgtgagtgtgtagagtatgtgaatatgagagtatgtgtgagtatgagtgtgtctagtgtatgtgtgtgtgtttagagtatgtgtagagtgtgtatgtgaatgtagagtatgtgggtgtgtgtgagtgtgtgtagagtatgtgaatgtgagagtatgtggatgtgtgtgagtgtgtgtgtagagtatgtgaatatgagagtgtgtgtgagagtacgtgtagagtatacgaatgtgagagtatgtgagtgtgtgtgtatgtgcgtgtgtatacagtgcctccccaaaggccccactccaccagcagcctgcccatccatcatcataacgggcgtggaagcccattccattcctgctgagccctgccaaaaaatcagtgagggagagccaggaagaatgtgcgccgggaggagcaggcagcgtgttgcagtccgaacggcccactgtgatgatttgggtgacgatggggccagcggtgccaccgagactctgatggctccttaggagttgttatagtcacaataatagattgttctctgtttctcaatgctaggtccattctttaaaatttttttttcttcctttagaggcagaggaggagatggagagttggtgagattaggattttaggtgtcttcaagtcaattctgaaactctaagaagaaatagagaattctgagtgattttaatttttctgcagtcatggggggaatttccatagggaagatgctttccaaggaagctcatgtgtcttggactctgaaagagcccttctcaggcctggttctggcatttgtccatggtttggggaaggtgggccctgggtgggggcaaggatgtgacttttggagcaaggtgtgggcactgtaggctcaatgtggttctgctggggtggtgttcttgtggctgaagaatgtgtcccctgagttggcacagtgatgcatgacataggatggaccaaacggaaggcatttcctgtcactgaaattaaaggagcaggggggtggaggggaagcaatggagcagaagaggagtttggttctaggagcattcagaagtcttgggagtgttgggttaggtgacacagttcctgtctgtcctggggctctatgtactccccctggagatttcactggaactggtgatgtcccgtgtttagggctatctctggaaaataaatatgaacataaaataataagaggctgaacctacgaaggaaatgaactaaagtcaatacacatttttcccagacaccatacaaggtcctgcaaatcactgggaaatgaatgggacacaagacatcacactccatgcggtgagctttgtgtttggtttttcccagtcattggctgtggtgaatcatgtgttctccctgtgttcaaatggctgttgagagaaaggtgtggatgttggcagctctggggaggagaccagtgatgacaccaattgagggtgcactatggtgtttagatcattggcttttaaaatttagtcaatgacttctgaagtgggcctttttgcttccagctgacagacatatcagagtgcgggagacagagtacccaattccaaccccaacatcctgcccacaagctgtgggaacctgagtaagttactcacctctttgtgcctctacttcctcatctctacctgggggaggcagtcaacgtacctaatgttattttcatagtaaggctgttgcacagaatagatgagttcgtaggtatgaagcccttagctttgtatctagcacattctaaatgataaaaatattggcattactgtcactaatgaggatattgaagatcagtgaagtgagggaattctcccaacactgggaagaaagaccacagcaggaagtaagctctgggaaagcccatgctgtctgattctaacaagaaggatgctggcgtcctcctgctccgagatgccaggaactgtggcctcaaacctgagggacaattctaaactccatctctagacaaagagtagttgccaaaccaaataattccgcaaaatacacatgccagtgcattttcctttctttgtcttaatttttatggatacataatagttttatgtatttatgaggcccctgtgatagtttgctgtgagcacacaatgtgtaatgatcaactctgggcacctgggataccatcacctcaaacatttatcatttctttgtattgggagcatcccacatattctcttctagctattttgaaatgtagaataaattcttgttaactacagttgccctgttgtgctactgaacactagatcgtattccttctatctacctgtatgtttgcacctatcaaccaatccctcttaatatcccctccccactacccttcccagcttctggtaactaccattctactctcttgctccatgagatagttttttagcttccacatgagtaaggacatgtcatatttgtctttctgtgcctggcttatttcacttaacataatgtcctcctgttccatccatgttactgcaaaggacagaattccattcttttgtatggctgaataacatttcattgtgtatatgtaccacattttctttatccatttgttcattgatggacactcaggttgattccgtatcttggctattgtgaagagtgctgcaataaatacaggagtgaagagatctcttctgtgtgattgcttttcttttgggtatatacccagcagtggaattgctggatcatatggtaattctatttttagttttttgaggaaccttcatactgttttccatagtggctgtaccaatttacattcccaccaacagtgtatgaatgttccctgttctccacttccttgccagcatttgttattttcagactttttgataatagctgtcttttaaaaaactgaattataactacttccatccgtatttttcggaaggaggggaataaacttcttggaccaaatctgatgagtcctgagatatgtggggtagatgaacaggagtcaatggtgggaccttttgacttttgagccctggttggagtattttgggatgttagagcgtccttctggaattaagatgtgcttagtaactgatgtgtggttgctactggagtgtgtgcatgtgtgtagaatttaagaaattataattcatgcgccaccttcatataacatattcatgtaaagattggcacttggtgaatctccacgacccttatagcatccctgtagtttgtaggtgtggttgtagatataggttgtagattatgggttataggttgtaggtatatatggtatagattgcagttgtaggttgcagggtataagttggaggtacagggtgtaggttttagtttgtagttatatgctgtaggttatagctgtaaatggtaggtatgggttgtaggctgtgggttgtaggtatagattgtaggctggaaacagaaagaacattgatcaaacgtttgtcacttctttgttttgggaacatctcaaatattttcttttagctattttgaaatgtagagtaaattattattaactgtagtcgttctgttgtgctactgaacactagatcttattccttccatctacctgtatttttgtgcctattgtatagatagacctggaccttgaacccagaacttttgatgcccaaatccctgatcttcctgagtatattaggttccttcaggaaaaatgagatgcttttcagtggtaatgtttatgcttcgctataataaatacacataaacgtggatagagaaaggacctcgtatctagtttcttcctaggacaccagttggttatcgtttgatgcattttctttaagcctgcttgtaccaattttttaaattatttcaacttctttagctctgactgtaccctctgccaattttgtatgctgccttctgcctcccagttactataacaaacatctcctatgtaaaccctttttatgactacattctacttggtatggctgcaccataatttctctagtgtaggatatttaggctgtttctgctgtttggctattataaataacatagcaataatcatctctgagctagaagttttcctaatgattttatctttaggtttctgggatgagcatagggctggatgtttgccaggctagggagaagctggggaggagcctggtaacgccctgagggggaagcctggcctggagttacctggctgcctggctcaagtgtgcccttggcaggggctgctggcctagaggccagcaccaagcagcatagtgggccagctttggcatagatggagcaagagagggaagggttctccctctgtaatcaggagtagaacattcaggcatggagctaagacaaatgagtaccttttagagctttggctctatagagacagtacaggtggccatgaggtggtaaggaacagtcacacatttatagcctccccacagttcatccttctgatatttctgccctgagttaccaatgagcaacaggcagttctctcccacaaagcctaagcagggggagttcatcctcctttgttaggatttgattttatcagagggatatttggaggtcagtggctggaagaataatgctgtcagagtttggtgactcttgccgggcagtgatggaggtgggggaggggcagagcctggcacacaaatctggggaagagtggtgggatgcgggaagaaagactggtccctgtactcaaggagattaggatccttagggcttttacttccaacatttactgttcctcctcccgggatgcctgccttcctcttgtttggcttgtgtttgcaaatgaagcagacaagttctagagaagttaaatgatttgtcctaagtcatgtaatcattgactagggaagggaaactagacccggagctccagcttcacgggtgccctttctcctgtgtcatgcagccgcttctgtgtgttggctagtctgcccagtagactctgctccttggggctctggttgtgtctgaccttgttgaatcccctgcatgtgtagtatgaccttgttggggtgtctcaacactgggcatgttagcaacactgagggatgaaagcactgtcatgccctggatggtcagccctggtttgttgaatgcacgagtgttcatatgtcagaaatacatatgcattcactctacaaatattttcaaacatttattatgttcccagcataatagtagagcttctactattgcaggggagaaagtcttcaataaaagttatagaataattaattacagatggtagaggagctaaggaagagagtgatttcaggttgccaagagaacatactcagagaggcatgatagcttttggggaccctgtcagtatcatcaggatagcccggactcagaagttagtctctcatagagccaataggaaggttttggcaaatctggattttttcacttgcattctggttttggttctgctattgactatcagggttactttgaaaaaaccatttgcttctttatgtcttgcttgctttatctgtaaaatgaagaggttgtaaaattcttctgtaaatcatttaattaccaccctcttcccccatggaaacaaacctagaaaatcctaactttgctttaaaaatattcagtacatggaatattttagtgttcatgttttctcttttgagtggggtttggccattggctggttcttggataaaatttggagggaggtattctccaggcttaaatgagtgaaaaagtctgggaaaaaataaaccaaccctacctccttcccacccaaggagtgtcctttgcatctggcatcgctgtgttttcattcgctggtcagtccctcatctgctgccaacctcttcccttcctggcttggtcagaaggtccagagagcccactgtactggcggggagaatctgtcccttttgcgcacatcattgggaactcaaagtcatctcgtgttggagtcaaatgacgtgttagcacacgcctgcttgggggatcctcctgcagttggcatattgcgtgacacacggggggattctcatcgtgctggaatgcatggccagccccttctttctccaagcacagttcagtgcattttccccccagttgctgcttctcgtaggagattatttctgattcgtattgagttgttactggaaaacacttcagagagataatgagctgggtagttttcctcttcatttttctttgttgttgttgaattcatatgggtaactgggctctccacttacactttattgattcctgaatttagggcatagctctgtaattggcaatttcctcagtgccacgtgggcagagagaagtactgtgcctggggctgctgactctgcaggaagctgtaggggcacttccttttagccctggactgacacagctgagtgcccgtgggcaagtcccttgttgcctctttcttggctctggtttttccttgctgtcttgtgaggggtcagaccagatgactttgagcaccagcccttccagttcttgaattttccaggctaggttggaagcccttttctttggtgggtttatgcatgaagggccgggtgtttctgtgttcacggatgacactgctgatcccatgtgctcttgtcattgttttccttggagggctgagggatgtgtgctgagtcacgcacatgcacagccggagtcccttgtgactaagctgtgcatttgcaggagcgctggcagggtcggtggtacagcctctgaactgggacagcttgaacccagcgttgcctggagtgggaataaaccttgaccttgctggcgtgggtgaggggcacctgcccagggagctaactggtctggactcatacagtgctctccttctgtccatttcagtatgctggctgtcagctttgtttatgcatagatgaattactctcatttcagattatcgtggaaaatcttgctgtcaagttcttaggacaggattaagtagaataggtgataaaggtcattggcattatttacaatctcttgactttcattcacccccatctgctgtagacaagctggatgcttacaagagcggcaaagacttgggacttagaatcaggcacacccaagtttgaagccccgcgtggtgctttctggctgcgtcaccttgaacgcttgcttccccaagtctcggtttttctaaaatggtaggaaacagctttgtttggcctaagaggtttgctggtggagactaagtgagctactgctgtgttttgccacacctcaatgctggtgggatgcaagatgctttgaggagggacacagacgaatttcttattatagttgtgtatttgaatacacttgtggaaaaatagaactagtacatcagagctcgtgatttcacagatattattgcccaggacaatgctaatttgaaaaaatcgagacaatttcaagttgatttcaaggataatatgcactgaatattagtgcaggcaggcaggcggggcagaaatcaggaagatgggagagaatgacagaatttggagtactactgagacctacactacaggtctcctatagaacatgtggtgggagcagaataaatgcatctttctctttgtgtctgtcctggtacaaggaatgtttggggcattggtataagaagctcccagagaaaaggtgatggtgacttagctttgtgcactgcatcaccctcacaggcaacgctgtctgctctaggcgtgacttgcactaagtgaatgtggacaagatggccactttttctagatccttctggggaagctgttagttgtaatagtgttagaacctaagagctagaagagactttggagatgatttactgcattttatgttagacttagacaatttttttacaaaagggaaaaattaaaaagccccagagagacctggacttactcaaagccacacaagtagttgagcacagtggctgagatgaatcattttgtgtctttccccaaggatctctctttccttgtccctctgtctatcctggtcaatagcatcattgtttgaagtgagtttttggaacaggacccagctgcattcggtgggttagtccagcaccacaaggatctgtcctttagcattgcctgtgtctctggccttctcgtgttagttagaagattgaggaggcaaccatgtagacactgctggaggaagaggaaacgaatttaaaagtcacaagttttggcctcagatgcctgtggtgttgaacattattagctttgttgtcggggcatgcgcctgacctcccggagtctcaatttcctcctctataaggtggcttttacctctgcaggtttgaatgaggtaagaggtggggagagcctagtacttggctcccttgaagaaagtagcggagactgaatccaaggccaggctgtccactccaaactgggattaggatgtcatggttcttcagcccctgactttcctgacaaaggcccacgtgggggctcttggttggcctggtcactctctgcttggggtgtcctcattcttttccctggagaggttctgggatcaggggtgagaatggggttaagttatctaggaattgagagtcccttcttcataactaatttttctttcctatctcatgacttctagataatagtctgtagttttaactcatttgttatttatataatttctctgtgctcggctctaagggtataagagtaaattagatctggcccttgcatggaagaagcttacagctgaggtggggagctctgtctagcatgcacagaacatggtgctttgacaaagggtaggtgccggggagtgaggtgggagccctgaggaggagatcttaacaagggaaagccttctacagcaggcaggggctgagctgggtttgaagggctgagaggagctaggctggctgaggtgggagggtgctggggtggcaggggctgcactcctggcagagggaatagcacaggaaaggcccagaggtgagctgggaaaccacaggcagagtggtgcagggggaaaaagaggggagggcaggaacacagtgggggaacttagtgcataacaacaatgccctcaacccttttgcctggctcttcaccacgtgagaggactcaggggagaagagtctgagtgctgtgccctttctgaattctttttttttattattatggtaaaatatacacactataaaattgaccattgtgagattttaagtatacaaccagaattctgttcaaccatctgtgctacttacttccagaaccgtccagcactgcagatggaaaccctggaccaatggggagtcactgccgttctctcctccatccagcctgagaacctgtgatctgcttgctgcttcttgaggcctatttggatatttcctatgagtagaatgataggatatgtggccttttgtgtccggcttcttccacttagcataatgttcttgaggttcacctgtgttgtggcatgcagcagtactccgttcctttagttctgtgcatggccacaccacatttttcttattcatacatcagttgatggacatctgtgttgtttccgcctttggctattgtgaatagtgctgctatgaacacttgtgtacgagcttttgttggtatcttttcttttctttttttttttttttgagatgggctctcactctgtcacccaggctggagtgcagtgacacaatctcagctcactgcaacctctgcctcctggttcaagcgattctcctgcctcagcctcccgagttgctgggattacaggtatccgccatcacacccggctaattttttgtatttttagtagagacagggtttcaccatgttggccaggctggtctcaaactcctgacctcaggtgatctgcctgcctcggcctcccaaagtactgggattacaggcatgaaccactgtgccaggcctgtgtttgatttggggtatatgcctaggaatgggattgctagatcctatggtaatgctgtgtttaacttattgaggaaattgctggattcttgaggatgtgtttcaggtccaccctctgttgttgccttgaccttgttacttgctctgttgggtgcaagctctgaggcatgggctagacaccttgtgccaggtcctgttttccatcctcacaagcaaccccaggtggtgggcactcttcttggtcctggttttcagatgaggagatgcaggcacagagtggttaagcatcatacccaaggtcacacagcttgtgagtagagggtctgggaattgaacccagacaggctgtccagagtgcagtctctccccaacacaccccatggtgcctcagagacaggagtcccatagacaacatcctggatggagcctgtagcctcctgatggtggttggaggctgtgcgcacagcatggagcccgagccagcccctggggatgagggctgcaccagggcccactcagccaccctccaccctgtgttctttccttgccttgcctcccctctgcactccttccttgtgcctcctcctcactccccaccagcctcacctctctctcgctctctctctttctttctcttttaataaatggaaatggtttatgggctcttctagaaattgcacctgccttctggttataactggggagagagagaggaagagacacagagaagagacagagaggcctccttcagcagatctgggtatgcccatgggacctcctggcctggacatcctggtggtgctttcaggcctgccacagaagtgaccctgagttggctctggctctaatgtctgagagtgccttcttcccctctccccctgtgactgcctgcaggacagcgcaattcctctgccattgtgtaagcagcccccacagatgatactccatgctagggaattaactacttgttgaaaagcacttgtgtgttcccctggctgaggctgaaagtgggggatccctggggaagggggtggcctggctatggatggggagaaggccctctggggaaatgaagaggggagccccaagccagttcgtcctgtgggagctggcccagattatggttcataatgtaaatttgggagtatgccagggccatattaatactgcatgaggcagtaaggggaccttgggcttgaaacccgagctgtggcctagaatggaactgaacagtgggccttgtcttaaagggacatgacgagctcccagaagtatgtgtcggcattatttccctctaatgctgtttactatatttgtacacaatgcccccaaaggatttgaaaaggaaatggcaatgtaataagagaggtattttttgttgcacatgcgagcatgctcattgacttaattattgtttcttttgttaccttggtgaattagagagggggagatatggagagggaggatgggaagttggagagggggaagagagagagagagagaggagaaggaaacccatgtctactgttattttgctgaaatctatctcagcgagtaggcagattgagaaatcaaggattcattcacaggtagaaaaaaatgaataacactttgaaagctcagaaaatcaacacaacagagaattcagtttcaaggtgccacttttgactcttctgctgctctttgaattgagttcatggctgtgctcatcgtctccatggagaagggcaagtcagtgccatttcttgtaggaatgatcgggccactaacatttgtctagaaaccaagcaaccgaaaagtgcaaatatctggatgctattggcttttgagaaagaaaggatgtcaggcatttatttgaaagggtaacctccatccagatagtgttgtagagcattttctcagacattagaaagattcaactgtgtacagtagttttagtgttgagtgtttcagaatattttcattctttccaaattgggggtccactacattagttagatgcttttgattactaatgatcaagaacactgactcaaattggcttagacagtaaggaaatgtatctcccataagagaacagagttgggggaggaaaggctccactatggatggatcagtggttcagtgatgtggatgaggccctgggccctttcttttcttcaccctactgtccttagtgacagctttataccaagtctgatttctctcatggccgcaagatagctgcagtggttctggacatcacatctggacatggcaatgtccagagtcaaggcagggaccatctcttctggtgaggactttatatatagagaaaatctttctccaaagcccccgatacttctcccatttttctcattgaccaaaaccaggccacttgcctggctccaaatcagtcagtgtcaatagaatgggaatgccctgatgtaaactagacaggacccaccagctggtgagggaatggggtcagtttatctgaggtgcaagacactgtggagaaggagtgggaacctggacaagatggggccatgttagtaacgaggaggagggtgacatcttttgcctccatgaatagcaaagggcagttctcacttaactggggtgcacatggcatcacagaatgctagaacttggaagggaaattagagacaatcttcttcaatcctttcattttacacatgaagaaactgagctccaggaatgaggaggagttgcccaaactcatggatccaccctgggccccaggcaccagctgtgtggggccagtgggccgttgaagcactctagtcaatgccacacagcctgggagcagtaccagaacccagggtgggaaaatgttggcagggcttccagaaactacttgtagggcctgtcattttcattcaataaatgtattgatcaaccattgagtctccaaccctgcactttctgggtggttatgagaaagagtaaagttaaagaagcctcaaggcatctggaagagaacgggttccaacctgtaaggacatattccaggctggatgtgctttctcttctggagataattctcattttggtctcttttttcatattcttactgcctgattccaaggacttacaacagtgtctagaacacaactggtatccataaatccatatggaattatattaattagaactgcatgaggtccagaaagtattgttttcatcttattttaatgtgtatacattggctacaaaattaagtcatggtagatatcgtccagataaaattgtccaaagaaaaatcgaacacggtaccttactgaaagtgagctcatttgaggactgtgatcttgatggttgggtattgactgggttagggggtcaggcagtgacagcggcttagcctgctggtgctgagggaggccggggatcatatccgtgcaggtgatccatgacagccctcgaccccagtgtttagaggaagtggatgggctcatattatttcctcctcttccctcccgcataaccctctgagtagtctttagagccttctcttaccagctaggtggctctcattgtgcatgatgtcaattgcagaaaatgtgagtggggaggtagctgatagataatgagacccaggtccctcagtcccgagctgccaccctaaataaagcaataaagcaacccacaagctgcatcagtgtgcctggtattttcatttctcctctagaaacaggtttctagggctgtcgagaatttggaactcataccacacataccaccatgctgaggtttctaaattcaggctgcggtttctgcatgtttttgagagtgtcagaaacttcaaaacatttgaagagtcccagaggagaagggaatattcttcttcttattattctgagagagcatagtttgcacattcttggcttcttcagcatttggatgctggagctctgttggtctgaggctgaagagcaaactctgccaaagcttctcttaccgtggggatggaaagttttctgtgtctgttttattacttaggcattccacgttctccttcgacatctcacatactcctgctgctttcctttgtgagtggagacctcgctttctttataggtggtaacagctgtgttctctagagagtgaatttttgcaccacaacccctattctcacaataacttcacttggacatcgaggataagtttccatgtgagaaatattgtttagtcatttattttaaaaaagcttttaaattatttaaaacaatttgtgggttacatagtaggtgtgtagatttatggagcccatgagatgttttgatacaggcatgcaatgtgaaataagcacatcatggagagtgaatattcatctcctcaagcatttatcctttgagttacaaacaatccagttacattctttaagttattttaaaatatacaattaagttattattgactatagtcaccctattatgttatcagatagtaggtgttattcattctttctatttttttgtatccattaaccatcctgcctcccctccaatccgccactccccttcccagcctctggtaactctctttctactctaatttgattttttagatcccacaaatatttttacttttcaagttgaactatataatatgatactaaaacttgaacacaccacaaagtatatgcatattcaaaactgaacacacccatggaactaacatccaaatcaagaaacatagctgctttacactttcttgaaataagcacttacctggagatgcaaaggcacttgcgtgctctttcagtagcatttctcttctccagcatcttcccttgacatcagccttgcctgcacattgcccagttgggcaaatttctctcccaggtagaggttaccaggcttgcattccctatgttttagcttctgtcttggtctttctgtgtgtttttatacctccatttgaagcaaacccaacacatgaaaagctatatttaccaatgggaccaactattggggcagtgtctacttactatacatatttttaaaaaactgtttctttaaattggagagctccaaggtgactgatgttaataatttataactatttattaagcacctactatgcggttctgtggtgtgattgcaaggggggggggcacgtccaaggttgagtaagacatagcttctgttcttaaggatgtcccagtctagaagtggagataagctatgcatgagcttgaccaagatcttgctacaatgaaagatagctgggaagagcatgagagagttcaggggaggaaaagaccactcccacctgtggcatggagggtcattcaggaggactacatagaggagggggcactttacattggcacttagaggaatctgccccttgatgggacccaaacttacatttatgatgtgaaaaatggaaaggagacttgttatgctttaacagtaggtgttgctatttaatgtatgaagcttactcaaatggaagagtttgggtttattaaaggaaattagaggtctctgtgttagcagttctgtatgttcaaaatgtgatacaatgggtttacttaaaccattggttgccccaagacccctttcttgaggaattggcagcttggcagagtttgcacctttgaaggctgccctgcaaggataaagacctccatccaaggggaaaggccagaagcaggctcagagctaggtcccacaactctgcttccctgtatccggcccccctgccagctcactcaagcaagccctgtttctgggcagcagcagctgtgaggtgtgggtgaggggctgttgctaggagcagggatccagcttgccttttctgacacgtgtgtttaaattagcatctttaaatgctgttcccgacagttattcaattttgaaactactggggattttggggcaggtggagagtgttaaggaggaggcgaggcaaatgaaaaggcaaaacatttgggggagtttttgaaaaagttaaataaggaaaagagtgtcagctgggggaaagcacatctcaggccccattgcaggaccccttccccagtggagtcatagagtcccctactctgccccaaggtgttggagatggctcatggctcatgggaatgtgcaggaagtcccctgagtcttatttatttatttatttatttatttattttgagatggagtcttgctctgtcacccaggctggagtagtgcagtgacatgatcttggctcactgcaacctccgcctcctgggttcaagtgattctcctgcctcagcctcctgagcagctgggattacagggacctgccaccacgcctggctaatttttgtatttttagtagagataggttttgccatgttggccaggctggtctgaaactcctgacctcaggtgatctacctgcctcgacctcccaaagtgctgggattacaggcatgagccaccgtgcctggtccctgagtcctcttagggtctccagaaatcactatatcaagtgaggtttggggatgggcacatctaagtgataaccacccactaggcaaaaggatcctggtgttgggagatggggtgagaaactggggtgggtgtcattcattcaaccgagtcatcactctcaagggaccagatggagaaagggaatataataagaaaaatgatgatgcttaaaataaatattgataatgcccacattttcagggaacttctatgtgccttagatatttatttatccaagagcctcacttctttttacttgtccgatccttacagcagatctccaaagaggttctctgttatccatggtttacagatgaggaaactgaggcacagagaggcagttaaatcacttgccccaaaccactgaagccataattggcggatctgggattgaagcccaagcttccgggcactagtgtgtgggcctctaatcttgcactttgctgccaccagaaattaggcaccaggatggtaactgaggaaaccagacaagagtgagaatgtaggggtggaggatggaagatgggtatcagggaggttttctgagttgaagacagtctgtcctgtggcttcttaaaggttgctttcagatgagggtgacacaaaggtgtccccctgtcctggacatgatttagaaccctatccacagagaacatgccaaattttatgcacctcagggcctttgcacatgctgttttctttggctggaatcactgttctccctgctttgtgtgttatggttctttctcatctgtcacacttagtttaaagctgcctcctgcagaggctgacacgtcgtagcagttgctccatgaaagtgttgagtaaatggatgaagaataaagctcttggcctttcagggaataactataatgagaaatttggaagatctttctgcagctgagcctttggaattttgatgtcttccaaaagctggggttgttaggagaagaggtaccaaagtggggcttcatctgtaaagacccagctggagctcttgttcacgcctttccctgaggctggaaggtctcttggatgtcacaggctgcctctttaaaatggagacagtggtggactttcctctctgttgaggatgggaatgaggatgagggagcaggcttggggtgagcctaccatccaggggcagtgaactttatatggcgtgggatgaccagtggcctcccctggggtggctgctggatattggctgatggatggtagaggaaacactattctcatctcaattcctggattggtgtgggggccaaatgagatcccatcattcctaattaagatgtagttacattaatgataaagacaacaatggcagctaatacttagagagtgctgctacctgctggtcactgtgccaagccctttagtgtgccttatccttgagtcctcaccagcccctatgtgcaggaacctgctgagatgaagtgacttgcccgggccacacacctggtaaagttggaaaccaactggagccagccccagacctcacattgcataccccagacctcacactggataccctcacactgcacaccctcacactgcataccctcacaccacatatcccagacctcacactgcacaccccagacctcacactgcataccctcacactgcataccccagacctcacactgcacaccctcacactgcataccccagccctcacactgcatatgccagacctcacactgcacaccctcacactgcataccccggacctcacactgcacaccctcacactgcatactccagacctcacactgcacaccctcacactgcacaccctcacactgcacaccctcacactgcataccccagccctcacactgcatatgccagacctcacactgcacaccctcacactgcataccccagacctcacactgcataccctcacgctgcatactgcacacctcacactgcataccctcacactgcactgcatactgcagacctcatgtataccctcacactgcatactctcacactgcataccctcaaacaaggcccttttctgactgtcacttgcaccaaacagaatgcagaagttttctaacttgaacctttgaaaattttttctgttctgtgtttcacgaagggatgtgttaattgttgaggtaattgcagagttccctggctttataatcactcatgttatttattgttcttgttattattagtaaaagccatagtaattcagcctttgggttggaatggcagcaggagccagctgagtgaccttggccgtgatattaatactctttacagtcttccctcgattatccaggctaatggaaagagaaccagtgcccgcaaataatcataaaacaaaaaaaaaatcaattatcttctcagtggagtgttgactgacacgtgggtcctacgccttttatgaggctggccttcaaacacagctgcatctttggtgatatttcagaaagcgtgaggtgggaaataatccctgttttgcaagtcaaggatggagaaggagcctttcatctctggatagagatggtgtgtggatatcaccagctgccaatggaggggtcagtgctgttattctctttcctaaagcaactcgggggtgatggagaaggttgccttaatcccctctgagcatttcactggctgatgtggactcatggaaaatgtcagcgtgctggcccaggccaggcgggctgaagccagtgtgtcttacagctctgtggagcagacgtggtgtgtggcttgaatggaaaggtcataaaggcctgggacaagtgagtggacggagccaatggcactgtctggtaacactatatggaagatgaaattgtagtgtggagctgagaggtgcagggctggggaaagagacctcagcattttccatgattaactttctaatagtaaccatgcgtggacagtgggtgctgggcagcagggagacagtcttctccaagcgtgcattcatacagtgcaggcggcttcccactatctttgggttttctccattttgtctgaggcagggatcagaacatagacctattgtctttgatggcaaagtgaggaggcagccaacttcatgtcctcctaattgactcatttcctccccgctggagtccccaaagcataggtgaccaagagctccctctcagctctaagtcatgaagaaacggatgcttagagaggttacccagaagctggggacagagctggcaccacacccaggcctcctcccttccagtcctgtgcttgggcaggcagcctgtgggcttcttccttcggccctgtccccttccctcagtactaacacgtgctcctagatttctgagcagcccctagagagaagtgacggattcatactagagtgttcatgacttcatgtatcacttgcctgagagtatttttaaatggatgctgggggagggcattgcttaacccaaaggaacaagaagtggactatgaaatttcagtcccagggcctgccatgtgttggcctgttctgggtgctgaagatatagtggtcagcaagacacacatcctctctcctttgagacctcatatttcactgggggaggcagaaacatagtaaataaataataaactaacttcagataatgagaactggttttagaatatgaaacaggctaaggggatagtgatgtgagtgcaatggggaacctgttttatgtagttggccagggagggtctttctaaggaagtggccaatgagtggaacaagatcaacttgcctggaaaaggaaactatgggggatctttgagggaacagtacttcaggtgtgtggaacagcagctgtgaagcctctggggagggaacgaggctggctgctggagagtttccttggctaccctgattaacggcccctcttcctgcctcccttccctattttattattttctctggggcatttgtcaccatcttatatttgtcttaacacaccttatatttctcttatcagtttggcttatcgcctgtttcctcaactacaatgtctgttgcatggaggcagtactttacctgtgtttttcagttctacaccctaggaatgtgcctgggaaatagtggtgcttgatacctccttgttgaatggggaaatgaacaaatgcatggactcagcaagcaaggcagacggtgggaggagatgtgaccaggaagatgggcaggagtcggagggggagaggctgagaacacgggcccttcagtgtctgtgtccttgtctcactgctgctgggaggggctggcagaaactggccttcttgccccatgagccccaactcagcagaaccacccagcaggtcttagcatccccagcctggctgctcccagtggatgcaatgctcattaaccatggagctggtaataacacgcccatgtcctgcactgcactggtgcctcaaatctatgtgttcagccttggtgtaaaatcactaggagccagggacagagggattccagggaccccacgcccagggggcctgagaggctcatccttcgtgtcagcttgtgttttccaggggtggttttgcctgcccggttactgctgtggaattgcctctggcccatttatggtggaggcctgggttccggtgacactgctttctttctgtacaccttgaatgaggtcaggcagctcttcatagagggaggaactcttcctggagtgccaagggtagggtctgcctagtcccagtctctccagcctgagtttgcatcagggagaaaaagcaccagcacctttttcaccaatgcgcccttccccacattcacacacgcatgttcacatgcatgcacatgtatgcaggccggcttcccctcaccttttgttttttttttttttgtaaaaaacacacatccctatgtccacaaacaccctcaccctcacttcctccctcatccacagacacctgttccccagtgatgcacatttgctcacacacctgcagctgctcacacatgcctgcatgagaggccctctccacccttcagtctcccgtacaccggcaggtgcccaccccacaccagccgctcacacaggcacccccgttttagcctcttacacttgcacagggggcccttcacctgctttgcagcaccggagccggagcccagacacatgatgaggcatgagaagtggaaagttctgcaggtgctctgcccaccgtgcaaaggaggaggcagaggtccagctgcctctcagcatatagaggctcagaggcctttgcagcatgcagagcttttggaacgtatcttactttctcattcttaaattcattcgggtaaccactgtttactgtgcacctaccatgggtcaggcgctgtcctctgcaccgggcatactgcagaaaacgaagcagatgcaggccctgccctcattgggttaggtctagtagtggagacagaccacagacaggacaaatagggaaacaggagaagccaggtggccataagtgcacaagcacaaatgaaacagggaatgggaaaaaatagtgctatggagggtgcatggagagaaagctctttgttaaggggagtttggagcagatttcaggaaagggccatgttgcaggcagaaggaagagcaagtgtggccaagacccaggaaggatgggaggagggtggctgtggcggggcggagtaggggggtgggctgtgggtactctacatgatggggatttcttaaacatctgtcagacccaagagactgtgatcctctgaagcccctggatatgtcaaattcatctcagtggccttatgcacccttcgcatgcacctggtataggccagtgctcagaaaacatttgctcctggagaagttgctggttcagttctgtgtggagctgctctgtgttccaagatctgcgctggctgcagggataacagggatggaagagaaccagcccttctcttgaggagctccctgctagtgagggtcaatcaagtgcctggaagttgtgtgtgggcatgcagagtgcatgatatgccaggtgccgggaagcctcccagcccaggggctggagggaggggcactgcttagtgggcagctctttggaggagctgatgcttgaacagagtcttcaggaaggagaggagttagccctgggtggggaggcagagaaggaaagagacactgaaagccgaggggtgaaccacaaatatttgggaaatggcaccagcaaggtgtacagcaggggtttccaaagagttcctgattccctcctcaaagtgatgggagccacacttcctggcttatcagttggtccttgccctctggctggtgctgtgtgtctgagaggcagcctaggaagacctctctggggagaagcagagaaagatagcgacctctgaacgtgctccccagaattcagtcaccccatcctacctatgagaggggacaaactggcagtctacaggtgtgtttggtttagcccatgtggcttcattgttttttaattttttttttcatcaattgcctatatttacaaaggagattttggataaaaatctggattgctagctgtttttgaaaaaataaaagattgaaaatgtacctttgtgtgcctgtgtcccctcatggtgatgattggtttgggcagagccattgcacgctctcctttcccccccatcccccggtgctgaatgcagcacccctcactcaccgtaacaggctggctcctgtagacacatgaccttggatccttttttggattaaggaagcaaacatgtaggattgtgcttctgcaaattctcagagatggcttttgagcccttaagctcttctggggcattctcatttctcaactagagctagcgggtgagagccctctctctgttttcatctgctgcaggacagctggacttcactgtatctcataaagaaaaggaggtggggtgggcagggccctaggctgtattactggaaaaaaaacaaaaaaaaacaaaacaggcagtagctcctggtttctgtaaaaatggtgtctagacgtgagtgaagaggcagaaggtcagaggggatttggaaatctcaaaggctgagcacagagcgcccacaggtgcaaggagaaagtacagggccagggccagagatttcctttctcttgttcctcagcttattcttaccctattccacccaccctgccactgccaggtgctcagcgagtctttattgaaagagagattattaatatggtgaaatgtctgagatggttctctctccgcatacccagtaatacagggtccctttggcttgtgggagtcacatgtggccattttcagtagttgggaagcctgggggccagctgggagttgtcactgcgttgggaatctgcctcctgggcctttttattaaggcgtggagttgtgtgctgttctcttacctctggtccctgcttggaggaagaggctgaacttgtaccacctgggcaagccagtttgctgtgaccacacatggattaggtgccagatgaccacctggggaatgtgccagtcaggcagccaggatgcaaagtgattcgcttcccccttgccagtattttctagggcgtggtgtttgcccgcatcttctggtgaggcctggctatctctgaggggcagaccagcacacctgtgggtgcagcagctcacaggagtctgttgggcggcactgccaggccctcgggaccctgagtaaggtctgacgcatcagggcaggcagaggggaggccacatttcgcctgccactgatgttagcggggaggccccagacccaggtgccaggcgggcaaattgatttttcagcctgcgaaacttctaaagataggcacgggtggtgctctgtgctggcactgggagtgacaggccatctgtgagtcacagtcccgcccgctggaggagtgcaggtcctgggcaggcagcactgcggtgagaggggcccagatgcaggaggggagggctaatgcaatgagcttgagtcagccctgcttgccaggccaggatcctcctcccaggccggcaccaaggagagtgttctactgcctggctccaggaaaactgctgctgcctgtaatttatgcagtttctatggctgagtggagcagacatggcctgaatggatcattggagtggtttgtgcttccctcgccctgtggcctcacatatttaacaaaattggttgcttggtttatttcttgaatcatcacttgaaatctctcagcttcattctgaattcctcatccctcttctccccttgtttcctattttctttgaattatttggctggctctttttgatatttgtgacattatcttacatttatgcagcactttacagtttgcaaagctctttcacatacattatccaggcaacacatatttactaagctccaaggccttggaataagtgctaggctcccgggaggcagcagtgcattcgatagctacggtggctgctctcagggagacagtgataagctactgctaacttgtaggaagacaatagcgtgagatgatgctgagggtttctttgtgatggatgggaaaagcctctccgaggagaagacatttgaactcagaggaagccagccaggaggaaatttgggggaagagcgttccacgtagtagcaccagctagtgcaaaggcctggtggcaaggattagcttgcttgtttctgaaacagcaaaaacgccactctgagtggagtttagggcatgaggtggtgatggtgggggtgggggaaatgctgggtagggggaggctggcaggggccgtttttcagggctttgttggccatggtgaggagcttggatttccttctcagtattaggtgacatattggaggaatttaggcagccacgcgtgtgatctggttaacactggtgaagttcactcttgtaacagtaaggccagggagtaagggcaggagtggaagcagaagggcccctcaggccactgcacttgtcctggtgggagttaatagtggaacggtggcttggacttaaggctcaagtcggatataccgtctcagtccttactatctggaagtccaagatcatggtgttgacagggttggtttcatcacaggcctctctgcctagcttgtaggtggctgtcttctccccatgtcttcacactgtcttctcagtgtaagtctgtgccctaatctccttttcttataagggctccagttatattggatgagggcccaccctaatgacctcattttaacttaattacttctttaaagaccctgtctccaaatacagtagatgcccttatctttaggggttacattccaagaccccagtggatgcctggaactgcagatggatagtaccgatacctgtatatactgtgttttctcctacacaggcatatctgcaataaagtttaatttataaattaggtacagtgacagatgagcaacagtaatgaataataaaattgtgcaattataacaatatactgtaataaaagtcatgtgactgtgctctgtctcattacagagcacaaaaattcctcattgtactgtactgtgggtaactgaaaaaatgaaaagtgaaactatggataaggggggactgtggagtcctaattagggaaaaggagtcaggctggtgggaccaggggaaagcaagagataaagcagataagctataaatctgcctttcttcacgtccagagaatttaaacaaaagagaaaccagataagttacaggtctgcctttctttgtggcccagggcatatggcccaggatatatgacccaagacatttggccttcatgcccggataacatacataactcccgggcttcctgctcaccatcaaacacctcaatttatcaaacatccaggctgacagaggaatgcaagttaagctccctgctgccttggcattatcaatcagcccaagttccattctctaaaatctgcagcaagcttttgtcttctggaagttagcttctctcaggctaacttgcccattgtctctcaggcaacatatttccccactttctctaataaatctgcctttcttgacctatgattttcttggtaaattcttttacccctgtgccatcagcctgcattcgcccatgacagggacgactgtatagtcacatcctgaggtcagctgacagtacgcagatgagctatttaccagataagatgattaaataacagtcattaaaaagaataaccaatctttattgagcacttactagatgccaggcattccccaagcatcctgcttgctttatttctgcatcacagaaattctatgaactaggcattgccatgattttctctcccttagagataaagaggctgtggcttgggaagttttaataacttgctgtgttcacacagccaggcactgggagatctgggacttgcaaacgtgctcttttctgactccagagtccattttcttaactactatgaaatgcttcctttaagaacttgtcccagaagagaatggatgtttcaagttctgaattatacttgatttctttggcattgcagaaagtagacagatttcctgtatggtcctgtattaaacttgtatgtgaggggtttttgactgtctgcatcagtggttctcaaaatggggtccctgggtcaacagcatcagcatcacctgggaatttgttagaaatgcacattcttgggtcccagcccagagctgctgaatcagaaactgaggctggggcccaggacgctggtttaacaagccttcctggtgattctcatgctctatgaattttgagactgctgatctgcagcagccccaacatactcacaggtgtttgcatgtggaaattcaaggctcgatgtccttgaggaaccagacttccaggtttcaggtcggatgaggagtggagcagcactgctcactccatgtgttgttaatcggcgttatctccatgtgttggagatatgttatttccatgtgtttccacatggaaagtcatctccatgtgttgttaattggcgttatgccaaaaaggtgttcagtggtcaatatgtttcagaaacataggtttctccttttttatttttctaaagaagcagggcctttcttgttgctcaggctggagtgcagtggcgctgtcatagctcgctgcagccttgaattcctgggctcaagtgatcctcctgcctcaggctcccaagtagctgggactacaggcgtgtgcccccatgcccagctaattttttcttttttttttttgtagagacagggtcttgccagagaaacataggtttcttggttacagacctttcatatgttaattattattcttttgctgtttttgaagataacaatctttgtgcttcccaggcttatttgatcctgagatcctttgtttgaggagaagagaacaggactatgtttgagaaacctgcactccatagaggcttccaggagaggacataaataattgaattgggatcctcacagtgacgggtttctttcaatcagtcaattaagtggtatttactagtaggtatgctgtatttcttcctgtggcagaagctatgcacaattccagaaatgaatagggatccttatttgtcaaacactgactctatggcaagtggagtgcaagaccctacaaacttatgaacctgataccatcacccaattagcagatgagcaatctgaggtccaggaaggtgacattgcttatcttatcactgagcaactgtggagctgcgattgtaccccaggactgtgtgaatccccaaatctcttttctttcctttctatactcctgtcatcgcttggagcttgaagtggggggtaggagtggggagaaaggagcaacactcatggaaggagaaccaggcctccaagcagcagcagtgggattgtgctaattgggttatgatatcagccccataaggttgtagggtcttgcactccacttgccatagagttggtgtttgacaactaatgatccccagaatttagctgtgccttgctgagggtgggaggaggactgttagcccagcagcattgaggagtaaagtggataacatccagtgagccattccctagcacagttttaaaacataacgttaatttttgtttttcttattataaacataccacatgcttcccgaaggagattctgaaaatacataaaagcataaaaatgcatatccattaggatggctattatcaaaaaagttggaaaacaacaagtgttgacaggatgtggagaaattggaacccttgtccattgctggcgggaatgtaaaatgatgcattcactgtggaaaacagtatggcagttcctcaaaatatgacacatagaattaccatgatccagcagttccactttggggtatataaccaaaagatatgaatgcaggaaatcaaaacgatatttgcaaacccatcttcataacagcattattcacaataaccaagaggtagggccgggcatggtggctcacgcctataatccgagaactttgagaggctgagtcaggcagatcactgaggtcacgagttcgagactagcctggtcaacatggtcaaaccccgtctctactaaaaagacaaaaattagccaggcatggtggtgtgcacctgtaatcccagctactggaggctgaggcaggagaatcactggaagctgggaggcggaggttgcagtgagccgagattgcatcactgcactccagcctgggtgacagagtgatactctgtcaaacaacaacaacaacaacaacaacaacaacaacaacaaaacccaacaaaatgacaacaacaaaaaacagtaaccaagaggtagaatcaactgaaatgtccgttcaatgtggcatagacatacagtgattattctaccttgaaaaggaaggtaatcctgccacatgctacaacatgggtgaacacaccttgaggacattatgctaagtggaataagccagtcgcaaaaagacaaaacacaatactgtgtgattccacttatatgagatacctggagtaggcaaattcacagagacaaaaagcgaatggtggtggccagaggctggaggtggagggaatagggagatgtttttggttacagggtttcaccatgggttgatgaaaaaattctggacgtggatggtgatgatagttgcaccacaatgtgaatgtacttcgtgctatagaactagacacttagttcaataccagcctaggcaacgtagtgagatcatgcctttacaaaaagaaaaaaagagagagagagggagagagcacctctacaaaaaaaaaaaaaaaaagaaaagaaaaaaaaaagaaaaaggaaaagtggttccaatggtaaattttatgtgatatttattttgccacaataaaaagagcataaaagtcaaagcaggctgagtggggggactcgcgcctctaatcctggaactttgggaggccgaggcaggcagactgcttgagcctaggagtttgaaaccaccctgggtaacatgatgaaaccccatctctacaaaaattacaaaaaaaaaaaaaaaatagccaggcatggtgatgcgtatctgtagtcccagctacttaggaggttgaggtgggaggattgcttgagcccagggggttgcggttcagtgagctgagatcgtgccactgcattgccggctgggtgatacagtgataccctgtctcaaaataaaatcaaataaaaatgaaagcagcagttaaatcctagagatgattgctgttcatatttgaatgttttatgtcactcttttctctatgcatttagatgcatacataaatatcttcctgttttatcaataattctttgaagctatgcttttaaatgatgcatattagtttcccaagtagatacactgcagtttacttaaccatctccctattgttggtcctctgagttattttcagtttttcagtgtttcaggttgcactgcagtcaagaactgaatatgtccatttttatttacatcacagacttgtttctttaggacagattcctagaagcagaattgctgggccaaaggatgcacatgttttttaagattctctatacattgccaagttgctttccagaaaggtcatgcagctttcatgaaatctcaccaaaagtgtgtgagaaagtggcttttctgttagctttccttcccttttcaagagggagctcaggggatgcagagaaaaacaggaaggcagtctggtcccttcagatcttggagctgggtcatagcttgggcatgttgtctcttgggcagtgaatgggcacctcgttagagcactgggacagggctgattggcactctggccacccaggagcgtggagcctgcctgcaggaaagaacagtcagttcatggataatcccttgatattggtgctctggttctagtccagagatttttatcagggctgactgcaagttcagctctgggatggggcagtgggggtagtctgctgagctggtcagactgagcttcctgattcggtcctcaggtcatttcaagggaacacattggaaagtcatctccacgttgctcttctccattgtacgcaatacaacattttaaggaacaaacagtaccttcttcctcatgaacattattctgtttaacagggagccaaacgaagttgcaagagtcctcattttcccatggtgttccatagagctgtttgtatttttaataaaaaactaataattcagaggctgcaaagcatttgtttttaaatttaaaaatgttttatagactatggaaacaaaagtttgcttcccctgcccatttgggaaacagagcactgctctcattcttaggggacagcatacacatgggtctgggatgcatggcctgctcctctggaaggaagttttgccatgggcggctggaggggcttcaaacactgagccagagagagggttaggagctgagggcttcataggaacatctgtcttttactctctctcttcatatttcaaagctctctctctctccctctctaacacacacacacacacacacacacacacacactctctctctctctctctttctctctctctcggaacatctttctctctctttcttcatatttcaaagctctctctctctctctctctccctctctaacaaacacacacacacacactctctctctctctctctcggaacatctctctttccctctctctcttcatatttcaaagctctctctctctctctctctctccctctctgtctctctccctctctaacacacacacacacacacacacactctctctctctctctctctctctctaggaacatctctctttccctctctccatgtttcaaaactctgtctctctctaactctctctctctctttctctctctgtctctctgatagatgcatacagatttggtatttaaaaacatcaactctgactgtgttcttggtttctctctaagtataagaagccaacaaggctccttgaagattccctcttttgatattagaatgatcttgaaaggagctctaaccatacccagagtaggggggctcccttaggttgaacccctagatgtgctgcagccagtggggagatgctggaagaaacagattgaatcatggacctgcccatcagggtcatctgaggagtctcactgttggtggtttcagatcttccagaagaaactctaattagctctacacaagagccagaggggttagtcaccaaagagtgattcaccccatcactctttggtgaatttaaccaaatttaaatggtgatagggaattccttttacaattccctaagaggaaatgagagaaagagttggtctttcccaagcagcatggttttcagggacttgcttctcctggtgccttctctagtcagttgccaaatcctcgtggctcaactcttctccactgctgctgtctcttttctagttcaggcttccattgctgcttgcttggactcttgcagtactcttccagctggtctcgtgactctgtcatttctgattagtcatacatcttactacccacttaaactttctaaatgttagctaattacttcactttcctccacaaatactctttcatggctcctcattaaccaaaggaaaacaaaaagtccaaacttctcttcttggtgctcaaagatctccatcattcctccctgtgttcctgggctgcaacccacataactagtcacccctatctcctgccttatgtgggagttcattttatcttttctgctttcttgtctgtgtatcctgaaattccactcattcttcatggcctggggctaaagccaggaagcttctgtttttgatgttctaagttagaagtaacatctctctcctctaactaatgagcttccccccaaccaaagcttctaccccatttcctctctaatggcactaatcttttgtatcttctgttagggtttttggaatactagtgacatctcctagagccttgtaaagctcttatttgccttcaagtgccccccattgccagggcatggagccttgcacagggcaaatattcagcaatgttggatgaataaatgaagagtgaccaagggttgccagtggtagtcagtctttattttcaccccgcactgctatttgccctgtactcacttggactggttcctgctggtgagaaacttgctacccaggtaccacttattttaagcacatttatgcatttccaggcacgtagcaagggggcagcaggttagtgattcatgagtaggtggaaaaggtgattgccttgagagctgctgactcagccgccagccgttaaccctggtgctcctctgggccctgaatcagtgagtggatggcatgaatgaacagatggccaaggaatctcaggagacccgagtctcctggatttggactttccagcattagaggtgcacagcccagagcctcacagggaatgctagaagctgcagtataatcatggcacattttcctggagaaccagttcttcttgaaggtttgggaatgaatattattttgtattcaatcacatttgtcatgaggaggaataaaatatgcatacatattttaaaagataaaatgcaacaatttaaagaagcttcctggctggacatggtgactcatgcctgtaatacctagtgatttgggaggctgaggcaggagaattgcttgagcccaggagttcattgcatcatagtgcaatgagctatgattgcactactgcagtccagcatgggcaacagagtgagaccctgtctctaaaaatataacaaaaataaaaagataaaatttaaaatatatataaagaaactgtctgcttgtggaaggcttgcttcaaattctaatccagactccctgaggtaggaggtaaaagtttcttcttttctgccttcagggctgtcatgggaaagtttgcaaggatctgggctagtctggcacccctctcggttgctcggttccccatcactgccttcccactccatggcttctcctctgcagggtgtagactatgatgaaggttacacttgaagagcagtgaaacagaactgggttccaatcctgccagctgcacagacaccatatctggagggtgatggggcaagggacatgctcactctccctttccagaagagataaagccatatgggcaacctgctatcactgtgaaaagtgagtggaataaattgtatagtgagtgaagtgtaagctcatggcggcagtgtaagaaacacattcttgccaggcaggcagataaccaagaaaggacaattgggaacacgtcagctgatggagatgctacccaattgtatccctatgtggagagaccctccagcaccatatcccagccacctgcgccctgccccccattggaccccctcttcactgtttgccaagctgaacattggacatgtcacatgttccctccctcagtgcctgacttactaaacagaaaatgcccagtgaaaacttaggtaagatgtcgcacagtgtttggcacttgataccttgttgctaatatggtggggaccccttccagcactgaaaaatcccgcagcacttgtggcagctcaaacagagaatgtaccagtcactggctcccctgagtttcttcagaaattgtttaaggagtgctggatccatgagggcagaggcttgtcccagtcactacactgtctctacctgctggaacaggtgcttagtatgtacgcctgctctgtgctgggcccatgactgcacaaggacagctgacttcagaggattgctcaggatcactgagaaattcatttggcaaaatattgtgaatttaatggcctcttcaatttgaaataaagccacccggctttttgaaatagagcttcctttgggagcttagaactaaattcttggcttcatagaatgccctagctgggtggacggagaatcccaacatatagatgtatctagaatgtcagaagtgaagtgatctgtctctccaaatcattggtgctagggagaaagaggtgagcatgctgtctttttaaaggattcaactaactctcagagctttggaagaaagaaaaaaaatccaaaatgtgtactaggtcagtttttatttggaagatggattttattgttatatttttaaactaggaagtctcttaccactcccattctccttccctggcctagaggggtgggagttcagatccctgcaacattttaacccaaaaagctcttacctgtttacctttctttgatagagttgccaagtggtcttggttttgttttgtttttcttttagaagagaggatctagctatgttgcctaggcttgtctcaaactcctgggctcaagcggtcctccagcttcagcctctcaagcagctaggattacaggcatgtgccgccacactcagctcaccgagcggtcttgaacaaaaaacccaaattggtccaagtatggattatacactaatgatatttatcaccatcactatcgttgtcattatcagttttattatagtgacttccagttcggtatctattgtgggtgcttggagcttttgcacatgtaatcttatttaatcctcacaccaacctaggaggaaggtattattattattgcccttttccaggtgggaaaattgaggctcggagagttgtaagtggcttgcctgatgacaaagggtgggtgagtggtagaggcaaatttgaactcagtgaagaaagagttcaggctttgctgtcagatggactgaagttcttctcttggtgtccatgggggtgccagagatgtgggggttcttctttctccttccaaatcagacgcaactgaaagtctgaggactcagcttcaatctgagctctgatttctctagagtatccaggatggaaaaggggatggtaagatgaagtttgcagggagggcttcctggaggagagggctctgaaacatgagagcattcgggcaaataggaagggcaggtattttggtggatccagaggcaggtggattcagaggtgggtggctcaagagtacgggcctccgtctcctcgtcttcctaagcatatttaactgtgaatgaagcaagacaagaggtgtatttctccatgtaagggaaatgctatgaagaaaaggcatttctggtgtcagaatcacgattgtcagtgggagtgtcaggaagaaacttcgtgactttttctctcttcccaggcgcccccagctgttaggtttcatggcaacccaatgtggtagaaggcagtttcttttccattcttgctgttagatttttatgttgtgtgaccttggggctgccttagggcctctctgtccttcatgggtctcacctggcagaggagggggatacacagggtgatttccatagggacttacagctctaaaatgctcgagtgtatgatctaatcatgatgacacacagtcagccacagtgaaatccctgacacatctcaaatttgaactgcatctttatgagtggaaaaactgtttcctgccccacaggacattttgatttaactaggacacacctgaccctggtctgctcacagacagagagaatttgttctgtggcccaaggcctctgcctgcccctgctcccaccccaccatgggtagcagtggccacgtggtacttgaggacagcatcctggaacttgcccaggagtccgctgcatgctggctttctctcttctgcagagacgaggggcccagatcgggtcagcctctgctcagctctgcagtcttgccagggggaggaggaatcaggctggggggcagggatagagggccgtgtgcatcagggaaggaggccctgagatgacaagctccatgagtcactcaactggccgctccagccagagagcatcaaggaggggtttatgacactgcctcatgcagcagtgatcagccatgaggtggcatccatccattgtcaggggacagtccatcctcctcaggcacatgcacagaggattgggtgcagaggagttcaccctcaacacctctgggtgttgggaggcaggagagcagtggggctggaggcacagctctgccaagcattcctgaaccaaagcaagccatcaatgagtgctcacaccgtgcaggcactgtgagcctgtgtccacatgatctcatcttgtcctcagggccatgccaagaggaggcactattcttcttcttctcagtttatggatgatgataatggaggcatagagaggttaagcaacttgtttgatgtcacccaacaatgctgaaatggggcaggatttggccctggccctccagagcctatgggcttaattgttgccttggtgggtcttagccttgagcctgcattagaacaacctggagggcttggccccactccagagtttctgatttcggtcaggtctgcgataggtctgagaatgtgtgtttttaataagtttccatttgaggtaaagcccagggaccacactagtctgtgctgtactgactcatcatcccgtctcagtttccaacctccaaaaccagagggttgagctttctaccagttctctccagttgaccagttaacgcagaaattccagccttctaatcacccataattatgtttagttttggacaacttaatatatgagagagcaatagtacttcagtaaactcctctactgctactgggtttctgtcacttgtctcctcttatttttgacaatttgatgttttgtgttgtgaggcttcctttgtgcctaaaagtcattgacttttagatactcactttggattatctccatcaatgtgaaacctcctgtgttgccttatttaatgtcttttgccttgaatttcacttgcttggataccattgcctttaacttggcatcactccttagcttgctttttacagtttggtagagatggtgtctcactatattgccctggctggtttcaaactcctggcctcaagtgatcctgccacctcggcctcccaaagcagtgggattacaggtgtgagcctcacttgatttttgcctggcatattctggtttattcttttacttttaaccttattttgtcacttggtttagggtatatttcttataaacagtgtataattttatatatttatttattatatattattgcatatagttaatactatatataatgtgtaccacacattttgattgtaataactaatatgttttggcctttctgttttttaaaaaatgctttttgcagtcttttttgtctatctgtaatagatatttaaattttttattttatacttttctttattaaattggaatgtctacccatgctgcctctcaagtatttaaaactattgttcaaccatattttgccaatggttaatgtatagagtgaaatagcctcttactccttgccacgtaagataaataatttttcttcttttcattcccccattccataatattacactcatgcttttatggtataatctgatatttaaaacttctacttattattattatatttttcacattttatcttctcttccaataaattttagttttcattttcattttgatttgtaatcacagttgtaacaattatttaaacctaatagatcttagggttcattgccagatctttattaccatggacatctcctgttgttgaattccttgttttgattaatgtcttaattacaaatatgaaaaatttaacacctgtttaatcttcttgaacaacgtattctgctttatcgcactttgcactttgtttcttttaatatgaatgacaacttggccctgctgttgggttttgcagaggagacatcagatatcagcttgatttttctctttttttttcatagataatctgatatcttctgtttggatgctgataattcttcaccatgaaattaaaatatatgtatgtatgtgtatatatatatgtgtgtgtgtgtgtgtgtgtatgtgtgtgtgtgtatatatatatatatatatacatgcctactgagcattttgactttcagacttgggtctgtcttctgtgttaagaaacttttttttgttttcgtcttttcagttaggtttattctgaattggctgcctgtcctctatatctgtcatctttttgtataatctgtcttagacctcacagtatttctgcttctgtatttttttcctcttcattttgagagtgctttctaaatgtgcccttcataacacatcttgtttcagaaataagttctcttgacttttactgcagacatagaatagatggtttctccaagttcaattatcacaatatcacacgagttgtttactgagcacagactgtcctctgtgcactgtgctaagcactttgtgtgcattacctcagaacaactccaaggggcatgtgctttgtttgtcctcattatatagattggggaaacgcatgtccagagggttgagccctactcagcctcatctgggtactgactgggggccaggactcaggtccagccagtttcacagcagagcctgtgctcttggccatgatgataatggcactttcccacccagtccttttttttttcaaatttatttattttgagtgctgcattctctaccttttatagttaagaatgttttcaaggtctggtgggaggttttcgtgttttgcatccatgaatgcagtcagtgtttgcctgtaaatagggagggtcaattctcttgggctcctctgctgtgcacctcattgcccatagaatgctactctcggatcttgcactagagcactggatgatgaagtgaagccttgcagagacctgtgagtctgggtgagtgagctggaaccatgaatagttccagaaggggaacttaatcctgtgatatttcttctctgtgtttggtaaagccactgcaccttgtgccaactgtttgcatctggcttgctgtttaacctggccaacatgccaggtacaaactgtgcttggacttgtcctccttcctggagctgccacctgctgtgtcagggacaagcccctgccctggccagttttcttctggatgtatctgccatgtgattcccagggcttctcagagctgctgctgctgctgaacactgctgtgatccatagtgaccagggagtcccggtgcctgatacttggctcacctccctgttcagccctactgatgtaggcagctctgatgtgaggttcttcaagggcctcactccttgtttcacaaccatcctgccgcttctcagggagcaaagctgcccaaggggcctccctgccttctctttttctgcataactgatttttttttttcagattcctttaggtttttggcacattgatggcacctgttcctagtttgctgagctgtggcaggttttccaggcatactggatttgttttgattttgaagcaggaatctgggcaggagggcattgcatgcctgagctcttgttgccatggtatttgtaaatggacaaatgtaaatgaagccagtggcagcatccttctccctccactgcccatgctcctgagtgtgggaattgggggacaagtcactacttcttcctgacttctcctttactcacctgcaagttagccacatcttccactttctcccttattccccacctcaaatacaaagtcctaggagaagaggactgggagcactggatttgatattgaattggagaagaccattacaacctcagattctaagattctgtgatagcatctgtcctggtgatctaagtcgggttaaactcagctctcttttaggagatcaagaggttttataatataggttgggtcccctgccagttcttcttacatatcacacagtcttagtttggggacacagtttttggaagcctgtctgcgggggttctggaactcaggggtggatgcaagaaagcagcattggttctttgtcacgaggtgagagcaacagtgtcaggaatagactctgtgagctcacccaccctcaaggggcatcgacttccagtgcatcactttcaagttcatctgtgtctggccataggcttggtcacatgctgaggtttagtgcatgaaccatcatgtctactgaggtacctgacactccagaggcattcaatatgttatgcaaatggccttcatgcccaggctaattagggagtccccattggactttgattattcataaaagacagttgataataaagccctggctgcttttgaaaattcatcaagtaagaatgcagggtttttccagtgggagctcagacaaaaagccagtggaaggacacaataggatcagtgctgaactcccatggttagttcgctctctgagatgcatgcacagacctctgcagaggccttgggcaacactggtccttttgttcgcctgggtccttttgtttgcctggtcagcagagtagagggtggtgtcctagtgaggacaaaggattcaggaagagcaaggtagtgtgggtaggggctggtaaggatggcgagtgggaagacaatgagcagagctttggagagcagagtttgaagtacttgtgggacaccaggtgaagacagccaggtgacagcaggagccaggtgtcctcaggctcttgctagtgctgtgtcctggtcaacacacttaatctagctgaacttcagttaccttacctgtatgtaaaatgaggatgttcatagctccctcacagtgatgttgagaaatcaagtaggtaaacaaacatggtatatagctttgggggcccactggtctgacagggcgctcaacctgtcctctttttttttttttttttttttttttttgagacagtgtctcgctctgtcacccaggctgcagtgcagtggcgcaatcttggctcactgcaagctttgcctcccgggttcacgccattctcctgcctcagtctcccaagtagatgggactacaggcgcccgccaccacacctggctaatttttttgtatttttagtagagacggggtttcaccatgttagccagtatggtctcgatctcctgaccttgtgatatgcccatctcggcctcccaaagtgctgggattacaggcgtgagccaccgtgcccggccctgtcctctctttcttgaatggtgctccttctagagcattccttgtaacatgcatgaggtggtctcttatcttgaagacccgcacctggtgaggagggtgacagacaggattctgttgtcaaggaggtggtaggaatggagtccagggtgctgctaagggagggccaggctgtatggtcaggtgggcacagctgcatggaggatgcttcaggggctctggagaagaaatgagtgacagagctttcaaggaccaccttctaggggtggggcttccaggcctccaaggagggctctgtgtctttatcagaccgatggctgcccagaacctttggcagaggggctcagcctgccttggtgccagtgagcttccacacaggaagacttcctgaggctggtggctttccatgagcaactacagggaggaaccgcgggggtactggtggctcagtagcctctgcttcctctgagggaatggaggggtcagtccctggtgtgggggtctcttccctgtcctctgctcatcatgaggctggctttcctcttttgcccaccccttgggctgggaccagagcacagccagtcaccagtatggtggcccagcacggcaggctgtgcctgtctgtgtacacgccagctccatgaggtggaagctttggcaatgggctcccagggagcttccccgcaggcttctcaggggaatgtgttgggagtagatgcatggagagttcgttttttctccctttcatgaatgagaaaacgggcagagaaatcacggcactcattggccgatgtttctgttggtgcagattaccaagggtgctgaagtcaaaaggagtgagccacagtcagccctctgggtggttgactgccactggggcctttagaccaggaaggtgtcgtgaccgaggtggacctggtggtgagatgcaaggtgtggcagcctgatgcggaggtagcagaagggagacaggccaagtcagggcagccggcaaggggcccatcacagagcagtgcaggcgggaggccacaaaggcctgggctggggtaacgtgggggctggaaccgggaagctccttcacacattgagcctacttcttgggactctgttccagtatattagtaatgttaggaatttcagtttggctttttaaaaagctgtttttcctttgaggaactcaaatattattggttgaattgtgtctccccaacagataatgaagtcctagccctccgtacctgtgaatgtgaccttatttggaaataaggtctttgcagatgatcaagttaagatgagatcattagcgtgggctctaacccaaaataactggtgtcatatttataaaaaggggaactttggacacagagacagacatgcacacagggagaatgcctataaagatgaaggcagagattgcggtgatgaatctgtaagccaaggaaggacaagaaaactaggagagaggcctggaacacatgtgccctcacagccctcagaaggaactgaccccaacgacatctccatgtcagacttctggcctccagacctgtgagacaatgcatttctattatttaatccaactcagtttttgatactttatgatggcagccccagcagacgaattcaccaagcttcccggatcccatttcttcactctctggaaaactgctccctctggtgtctgagaatcacacgtatgacctccctgaggggctcagggttggcaaggcctccccatctgggtggtgaaaggtgctctctgggctgcaaagaatccagacagctctgtgagcagcggctgccaattcactgacattgactgactctggggactctacccttttcatccccatgtgcccgtttgtccagcccctgcagaaacccctgtggggtctggcagtaagcgaggctgctgttccagggaatgtgtgtgctgaggctagccaggcagctgggctagcctcctcctgcacagtccttcttaggaatgtcctaagtacctattcagccctggcctgaagcaaaggaggcactgggtaatgaggactgggaccccattgctcatggtccaattggcgaaatgccagattaagcacagatcacttttcaaagtcaaaggcaacgtggtgagtttctttggcattaaaagtcctctcccatggttatcccattctgagtagccagttgtgtatttattcacccagccctgtgttgcggttattgtcttttgagtgtttgattctatcccctttatatgactcatcagcccccagaaagcaaaggccctgtcttgttcagcctggcacaggggcagccgaaattcccacagggctcacctccttcgcctctgcctgagatgtcttatcagcgtcactctcattctgcaggggaggaaaccaagactccagggtggagtgattggctgtatgtttcacctgcagccacgcgaggcccagaagtcttccagtgctttggaggttcacaagaaatatggtgactcaactggaaccacattagaggtcagcatttaacaggtcccctcaattttcccacaagggccagtcttgtgtcctcggctatgaccatgagccactggggaaagagatgctctcttccctgcagctgcacggctccccgtgctgggttggccacacactccccacccagtgcacctccgttgattgattgacgtggtgttaaacatgtggccttttgcaggcaactctaggagggtgatgagctttgcaaatctgcccagtgcctaaaactgaaccacacacataattcactcacacgcactcgctcagttgggcgtgcattctcactgccatcctgcctccaactcacgcttgacgcctcacagttctggacttctcttctaccacacagcagtgcctgccctggctggccagtactacattcctgacctttgggttttgggtccctgggggcagcttgctgccatccgaaccaccaggccctggccctcagcgaggcttctccaagtgttctgctgccttacttctgctttcgaagcaccatgcctgtcctggggtggagtcagaagtcagaagaagaggctgattagccggggtgcccttggaggggccagggtctcctgatctgcagccagggctctgcatttaggaagccttgtcagaagcctgcaattggcattgaatctgtttagagtgctcaacctagtgccaggaactgtgggaaatctgaagacatgatcagtttccagagagtcaagacaaccagcagaggattcaggttaataaacttagacttgtgttcagctacctggttcaaatccccattcactggctttgaccacaggagaatgatttcacttctctaagcttaatttctttgtaaaatttcacaaggtattatgagcattaaatatgataatacatgcagaatgctttagtacattgcataacacattgtaggcactaatacatcttaccttacaatactctggcctctcctctccactcccatacaagcgaggactcttagacagtgcctgtcatgtgccagacatctgtaaagggatcatataagcattaactcatttaatctttacaggaactcagggaaagactgaggcacagactgacgaacttgtccatggttccaaggtgcagaaccagggttagacctagaccgtgaggctcttgcatctgtagtcttgcttagagcactacttgcaaagaagccttgggtaacttccctatacctccatttcatcatctcgaaaatctagatgatgatgataccagctaggatcctcaggaaagttccctgaacttcattaagggcttagaatgatgcctggtgcatcctcagtacagagtaaatgcagtggcttcaataagaaatacaagtacacaggtggccaacaattcaagctattagatgcagaaggccaaggaggtgatccagctctttcattatggggaatcagagcatgcagatcagcaggggctgggttatgagagatgaggagtgggctgatccaaatgagaggtcagcttgagcagaggggaggatgtgggaaggcagagagtgtggaagccatgtgttgggagcagggtctgagaacatcaggttggggacagcccacgagggaccttcattagcagtgtggattttcacctgcactctgtcggcaagcactgaaggttgtcattagcacactggctgtcacagaccagaggggcttcccattcagtcaaatcttgctgcccatccccagtgaacggagcagtaggcagtgaggcgggaccggcagggcgtacaagatgctcgcccattccctccatttgaattgggcttgggacatcccaaggggctgctgcctgggccctgaacacatctaagggctatgggtttatggtctttcagctgctgtttatgtcacaaatgcctgtcacagaaggggcattaaaaataaccgaatggctaataccatttctcaaaataactacttgcaaagtgctttgctggggcaaatggctactaaaattagactccctggtggtatatgtagggtgtgtgtgtgtgtgtgtgtgtgtgtgtgtgtgtgtgtgtatgacttctaaacccatttccccccagggtgaggcccacagtttgcacccttttgttctgtggtcccttctgtcatagctgggtgtcccagaacagtgttcacccagtcaccccaagatgccctctttcatcctgcagtcctcagcaaattggagccactgccctacattgccctgttgtcctgctctaaggagcagaattttgaagaatcttggagggcggggtggcctcattgtagcagtggcctaattccttggtgtgccaggtaataatagcacgccgtggggggaatctcactcagcatgctgtccgaggggaaactgggccatggaacaatgtggcagccccactcaaggtgacctagtaactgagggcacggacacacgattttccaggccccagttccagatccaggctctagaactcttcagtggtctcctgggccagtcctttgggccaccaggcaaccaggtcactcaaatccaatcaactctccatccactaataatacaaaaggaaatgtgggatcttaagagcaagttaagaaaacaaagtgaatcagcactgtgggggattttggattcaggacaaacaaaacctgagagccagcgttggttttcttttagataatgacttgcacggaaagaggtggacctcagtgtctccatctttgaaatgggggaacactgagttatttagcaaccatttattgagggagtgcctgatgtgggcctggctcctacagtagggctgattagggctcctacagtaggccctggagttacaaagagtggttcaaggtaaaagcaaggtcaagatacatttacaagccagtgtgttgtctgtacgtggcagccctataaggactggggttctgtgtggtcctagagatttcggtcctggagatgaaagactgtgagtatttacctggaatggaggcccagggaggaatgaatttccctactcctgtgagagctgtatgtaaatagactgtttctgtgttggaaagagcacaggcagagtctgtgactttaggcaaactgcctaatttcttttcaactgctaaatgtgaataagcacagcaccaacctcctaggtctattgtgaagattaaatgacataacctagtgtggtcttagcgtgttgtaggcactctacacactctatcgttagtagtagtcatattaatattaaactagcaaaaactgtttgcccaagaagttccagtaaatcattcccttcaatcagggtgatgataattttattttttagtattattaagtcattgctgtctgtaaggccatcaaagagctggagccacttgctggaatcaggctaggtcaatttctgaatgctggaatgaggttgaggggagtgaggtagaggatacatttttaaaaagtttacatgtaatcaaaccctggtcattcacatctcctgttagattcattatgggagttggatatttaagaggaatctttgccacaaattcatgtgtaaacccaataattctcgactgttaaaagtggtgggagccctagatattaggatatagggtcatttaaccccgtggttctcaaccaggcatgattttgcctcccatgagacattggcaaattggggtgggtgctgctggcatccggtgcgtagcggccagggacactgctcatcttataatacacaggataaccctcctcaataaagagtaatctggaccaaaatgtcaacagtgccggggttgagaaactctgtcctaacctgaagatgagacaactgaccaccaggaagggggagtgacttgctgaggttaggcagcacagctgcaccagagctgggatccaaagtttgaatcaattgaccagaggccagaggccagacagaaccttgatactgtcatctcacctgtgaagtaaattatcaacctcacccatgtgaatgaggccttactctatagtattttcaaggctctttctcttgtgatattaagctctgctttggaaaaaccaggttttcctattctgggcttgctgatagagtaaggatggtagattcagcaaatgaaaataaggttgtccaggccaggcgcggtggctcacgcctgtaatcccagcactttgggaggctgaggcaggcggatcacctgaggtcaggagttcgaggtcaacctggtcaatgtggtgaaaccctgtctctactaaaaatacaaacaaaattagccgggtatggtagcgggtgcctgtaattccagctaccagggagactaaggcaggagaattgcttgaacctgggaggcagaggttgcagtcagccaagatcgtgccactccactccagcctgggcgacaagagtgagactccatctcaaaaaaaataaataaataataaaaaataaataaataaaaagaaaataaggttgtccagttacatttgaatttcagataagcaagataggtttttggtttttagtttttagtttaagtatgccctatgcaatatttgagacatacttatgctaaaaaattatttcttgtttattctgaatttcaaatgtaactggcaccctatcttttgtctgtcagccctgtgagctctacccatcgccctgagatcacaggtaggccctggggtcatctacccctgtctgaggctcctgcaacccttatgaccccctctgcctagagggggaagatgggaaggggcaggtgggccttgagtggagcaggcattcctagctcctggcctgtgggtgcctgggaagagccggctagccacactgggctaaagggcctgtaagttgagaggttggccaaactgtccctttttataacaggagaatggtttaaatgaagtgtcagcaggtgacctatggccctggaaaaccaagtctggagaagttgtggcaactttgcccctgattggggaacagagtgtcctctgcacttctactggtttccagagaacatggctgccctggctgaggagcacttggacatggtaccttccagggctgaggtgctgtctcctcgtcacccctgggctctgggcctgccccaggggccagagttgggcggttgttcctaatacagggggaaatgatgggcagggctgtgcacccacagagctgctgctgagccggcagctcagcctttttgtttagaagaggcctagatgtggagcctatcaacagatcagaaggggatgctggctcagctgctccctcaccttgccttatcccacacccctttcacctttgcttccttaccagcccagacaccaggctccaaaccagtcagtgctcagggtccggcagccaatggcacaaggtgggtggcccactgccctgccccattccctccgcctcccaatccatggtccaggctgttgctcccaggtgtcaggatgccatcccccttccccagagcagcttcctgctaggaaatctcatcctcacagctcctcctaaagggcagtcagctggccacagccacaacttggtggcctttcttcctgttggctcagaacagcctttgagggtctttgggagtaactgcttagggactcaccatgttgtctgccatcttgtcgacatcgttgggccacctaatgaccagggctggctccacctggcctttgctgcatgggtgcttattaataggcatatattgaatgaatatatgcctatattcacagagttgaggacagttaacccatattgcagaaggtgtctgatgataaaggctgaatgaagtcattggttctcaaacttgagtgggcattagcatcacctggatggccttgttaaaacgcacagtaccagcccaacctggggactcctgactttgtagttctggggtagggacaactttgcatttcttacacatccccaggtgatgttgcaggtccagggccatctctgaggaccactggcttaagctggtgcccttctcaaaatgtcttgcatttccattttacttttattaaaatattccttaattaacaatttttaaaaatcttcattgactacttactctgtcccatgcacgaaattttggggataaaaagagaaaaattgcctcaaggaactcacagtacagtgagagaattgcccatgacaaacaatgaccatttaatctaattacttttattgggatattgtgttgaaggtgcaatgggggtgtggtaaggggaatgtgcagtgttgttgggggtatccctttgagggcaagtgtgatagtgtctctctctctcttttgtattgcacttctctctctttctgtgtattgcaccaaaagtatatactttttgaagaagtatacacttctttttgtgtattacacttctgtgtggcttgttttccccagttgacttgcgagatttctaaggggagaggctgaggtgaatcttggtcttcttcatttaagtgtgttccagttgacataccaggcaaccaaaaaaaaatgtattacctacagaaaagaagttcatatcaaagaagtgaatgcctaatggtggaatttcagggccaagtctgtgtgggggtttactcatctagattctactatatgtgttgagttctagggctgagctggatggagagaaagttaggcaggacggtacctttcctggttcctaccatcaacatcgctgactgagtttatggggaacactgctggtatttcatcctgcagggattcttgaaacctgccatgagctaagacagctcattttcaagagctttaagtggtcctgagcggatgcttagctggggacttgtcatggcctgaggtgacataccctttctgcagagggagaaggcctctgaacctttctttcttcagaacctgggggactagggaggaagggaaacccctccatgacttgcctgcttggggctaggagctggaaatggagacagaggaagctgcttcttattatgcacagggccaggagaaacccttgggctttgcccggggccagggctggcttccctgtgactttctctccacacaccctctcatcctccctggcttcaggagtgacagatagaagcagaactaagccggctgtacccatcattaataacagaaatattcaggatagctcattctcatggagagctcactgttctttgaaaataccttagattcacgaacagattgaaaagggtcaagagaggttaagaacagccaatatttatagagcttgtgctctcagccacaatttcaaagtgttctgtgtgcattacttcattgaatctttagaacaaccctggaaagtggggtataattggctccattttaaagaaaacaatacctcagctatgcagtttgagtaatggtcccgagatcactccaaaaggaaaagtgtagcaccagatttggaatcaaacaggaagactccagagcctaagttcattctctgcggtcctgctctacttggtggtggggaaggggagggaggagatgaggtgaggttgaggaaagaatacttcagtgtgtgcttaatctgcctcctcctgcaccctgccctcctcctgaaggtctgtcctggccacggcagcctacattatgtcctctttccagcttctgttttgacctggtattgacatttgacttggcatggcttatcattatctctatcttgttaggattgcaacaccctagtgagcagggaatggcctccagctccctcaggctctcctaggataccttacagcagaggtcagggtagggctgataaacacttatagttgcccagagcccggtacctggtccacagctagggtgaccaaacattctagtgtgtttcagttttggcactaaactctggcattctgggaggccccacaatactggttggtcaccctatatctcatttgacaagcaaggacattggtccttgggggacacagtgtggtcccagtctcacccatggttattggtggaggctgatcccaaggcctgctctctgaccctgatccagttccctctcctcctgctgctttagaagtgagggctcagtctcctgctcttgcttgttaggtcaaaagcttttagagacagccactgtcttctctatgggctctgagatgcttcttattctcttttggagaaaagacccccacagtcaagaagctttggctgagccatccttacttacagagcttgtgctgggcaagtcttggagggtcagcctgtgttctctaggggcttgctaacagaaaggaaacggcttttcctcgaaccacagagcacagcaactcttcagacacgctcggtcagcctgcaggggcagggggtggttgccaaattctaatgatcagaaattagaaacgggaacagtgaattctagaccagcagcctccaaagtgggatgcacaaaactatcctttggaataggggaagaaaatgttaagacatctatttctatttacgtttatcactctttaaaatgattacatctgtgtgcactttattgcgtatgtaatatgagcaccatatggtgcatgatgggcatacaaatacacacgtgggagtggacactgatgggggttgctcattcagaagtgctccctatgtctccacagctgtattttaatgatcatgaggtgggctggctggaagatggtcactttcagcagaggaggttcagaagaaggagagagtgagtcttagagtaaattggcttagaacatcccttagttgatgtttaatgcagatgatgcttaagtgtttctggatggtgtgtgatttcttggagcgattttgtgcatcaggaagtgaacttcctgcagccacattttgcacatcttgttccattacttgtctaacaggatgctcacattagcttgtgggtgacaagaggcaggctagacagagcagaggttctcaaagtggagttttcatatcagcagtaagagcctcacttgggaagttgttggcgatgcagattcttaggcttgctttcagccccactgacttagcgactctttgggtggggcccagcatgtcttgtttggaccatttgtccaggtgatgctgatgataggcaagattgagaaccatggagatacacaggcaggggcacacagtttgaatcctggttctgctcctgctgcttctgtggcctgggacaagtgactgatggcccagagccttgatttccccatctgacaaatgagagtgataacacctctctcctggcattagtatgaggattaaaataggagacaactgatgtaaagtgcttagcactgtgcagagcacaaggagttactgcatatctagcctcagttgtgatttttaccattaattggattatgatgggggacggcaacttctataaggaggtggcacagaaatgtctgatttctccttccttctttcagtagctctgtgaccttgggcacatcattttccttgcctataagatgtagataacgacacccacgtaacgggataagtgaatggaggtgcctgcagtgctttgcactttgtaaaacaccaactgaataggagaagtttctagagagctctttactgaggctgcttctactttgtcctttctggaaaatacttcccctctgcccaaatagtaaatgagagaggagaaaaaagccagaaatcccacggtgccagacttgcaggcacaaagagcctttgcaccgtaggtgactttgtttcctgagtgccatttttggcccctcccaccctggtcctcctagatcctggcctcagcttacttcccctgtggttccatgttgattccttattaaaatgtcacctgcaagtcatgaaaactcagtgtggtttcctgaaagaggaggggcagtgattgtccagagtgttcttttgtcacgatgagaattgcttgggcgacagtgtcaagacagcaaataaattgcctcctccccttcaatgtctcagtgctgtttttgcagcatgaatggttccagtgtggagataatccttgctcatcttttcaccaggttcttgaatgtggaaaatgggcaaacagttctccctcaccacacactcctgttatttccagtgtcccgtggccatacacccatcagcagagaggcctggagtggcaagcaggggtggctggaagtctgctctcttctcatgagagtactgagggcccagtgaggtgtctgtagagcaagatagagccaggtgatcggggaagagagccctccaccccagttttcccaggaggcgacaggccccatctctggggggagtggcgcatgcctttctcctcgtcacctgccccgatgagccccacatggatgaagtgagagcctgtgtcaccaccccggctcctcaggaggctggtgatgaatagggatggcaggaaaaaggagctgggctctgctgtgacatgtctctatttttccagaaaactgccggatgtccttcccttgtaaaagttgaagagaacagaggagaggagaagggtcggagcagagagatttctgatatgctgttagtggcgctgccaattaaaaagaaattaaaacagaaatctccgtgggctgctggagtgaaaaagtctcctctcctggcccctctaaacccttgaacaaattaattggttggatgttgactgggtaccagtgaaattcttagatattaggtcttgttctatggtaggcacagaagaacaaggggtgtgtgtgtgtgtgtgtgtgtgtgtgtgtgtgtgtgtgtgtgtgtgtgtatgtgagagagagagagagaagagaggaaggatgggggagagaagaagggaaggagggagaaagggaaggaggaaaggagggaaggagagcaagagagagacttgggggcatcggggtgggttggagcagttcagggattgaaatcatgctgcatgacatttgggcattttggggtagctgagacaaaaactgctggaatttcattttgaagataagaaaaggactaggaaagagagcttctttaggccagaggagaacagattgaggctgtgaaggactcttggctcccagctcttcttgttctctgtggactttcaagcttctgcagggagacagtgaactgggaggaatatgtagtgactgtgaaggttacatgtggctggaaggggcaggcaaaaggtcccaaatggccctgtggtgctttagttggcagagagatggacaagttgatcctgcccttatgccgtctcatgcatttgtccaaaagctttgtttctgctgcgtggtcagagacagaaggaggaggctgcctccccttcctgggacctggatgttttggttcatctgggttcctttctgattttgtgatgccctaagcctcctgtccccacagcccttctttcctttttgtagattctcttgcaaacttacaaagtgtctgtaacctttggccctgggacccagcatgagcagcttactggagtcaggacagatgcacgtgggtgctgagcagagccctgtggagcctcggcctctggcctccttggccagctgctgccctgtcccagggacagtgtggcttcccagggagcacttcactccaatctctgagccataaaaaattaaactacagggctatcaaatatttaatctgcctgaataatgaacatgggcagattcttatgaattctttgctttgattaaataaaattgaaggatgggaactgtctgcttggcacgttagctgaaggcaatgcagggtaggcactttgtgccagggatctggccctgagtctggaagaaccatttggttcatgtttcctcacccactgtctatacttcagttgtggatagccctctggtctttattcttcttacctgtaaaatggggataataatgataatactacctcacttacaagattaacgtatgagatttatatcaaaagcctagtacctggcacctgttagtttctttctttttttttttttttttgagacagagtctctctctgttgcccaggctacagtgcagtggtgcgatctcggctcactgcaagctctgcctccagggttcacgccattctcctgtctcagcctcccaagtagctgggactacaggggcctgccaccatgcccagctaatttttctatatttttagtagagatgggctttcactgtgttcaccaggatggtctcgatctcctgaccttgtgatccgcccgtctcggcctcccaaagtgctgggattataggcgtgagccatcgtgcctggccaggcacctgttagtttctaaacaattgttaatatcattcattactttatttctaaaacagcatgattgaattgagcatttccttggacttggaaaggtatgattttggaggagggtgaacctgtgtaggctgttgcagggagttccttgacattatcaactgaccagtccatcaacaaatttatttgttcatttatttattaattcaaggatgttgggtccatttttcagttagactctggaaagataagtgattggtcctatcccttaagggaaatatgctttcattggagaaataacatgtacacgctgtgtgtatgtgtgtgtgtgcacgcgtgtgtatgtgcatacacatgtgtatcttttttttttttttgagatggagtctcactctgttgcccaggctggagtgcagtggcatgatctcagctcactggaacctcccccttccaggttcgagattctcctgccttagcctcccaagtagctgggattacaggcgcccgccactacctccggctattttttttttttttttgtatttttagtagagacaggatttcaccatgttggccaggctggtctcgaactcctgacctcaggtgatctgcccacctccgcctcccaaagtgctgggattacaggtgtgagccaccgtgcccggctgcacgtgtgtgtctttatgtgttcaccctatggggagagaaaaggttcatgaaagttgagattactgtgggtagggttgtcagggagggctttgccgggagggggaagctgcgctaggcaagctgtggctccagagtcttggaggcgcctgtaacagtccctgcggtttcaaaagaattcagagaggggagccatagcctggtctccaaatgtgcagcaccttctgggcaagcttagacttaaaggatatcattgtagataatgatttgcttatttcttgctctaggatatggggactgtttctttttttctgggatgctttaataggatagtaaaagtaaacgtgtccctgtctgatggcccttggctcagctggaagaagatcagctctgctgcaatttaggaagagataactggggtccatcacgtggctggttcagaccagggttttatgactgggatttgcctgctggagccctgggtcactgtgccagactcaaccacaggtcacaatctggaactggatccttgctgccagatgggaggcgggcagggccagccctatgctgtcattggcctgtagccagctcaggtctggtggcaagtgaaggacacatcctgatgtctgagtgccctgcaatttattggcttgtggtttaggggtgtgggggacaaacaccaatgccacagttgacatatatgggcgtcgtatttggtggggtcaagagtccggagggaggcgcatccagcttctgtcttggctgcaggccaggtctgcccatgagacggttctcctccttaacctattcaatccaataatcgatgagcaggtattttctgagatctgaagtgtcaagtactgaagacatcaccaggcttggctccgtgggacacacaaggaattataaagcaggaccccctcatccccctcaggagctaacagtccaattgagggaagcaagagagacagacgcacgtgaaaggttaaacaacttgtcctagcctgaaagacaagacccgtgggaaacaattcaggaaatgtcaccaggcagcatcttcttagtgctgcaaagatctggaggaacgaatgaccagccggggcacaggggcgagggcttaggcttctggggtccggttacaaactgtgacaccttggccacctgggtttacctgtgtgagtcctggtctctatatccctcagatgggcacagtaagacctgcctcagagacatggggaggatttaatgagacaatgtgtatagcacattgcctgacgaaggggaaaaacctcactgtgatagttaatttattgtcattggctgcaggggccagagagtctttggggaggctctgctggtaaaggctgagcctagccttgtattgctcatcttttggataaggtaaggatggaacctttgtgaagaggaagactggacacctcctgccccctcccactgtggtttgagtggattttatcccgcatctgttgtttgcctggcattggatggccctccacaccagagagctaatgcctgccttcatcactagtgtctctgtctctttgtttcatcagcttctttatgtgaaaagagagaaatgatctctgtctctttccaaatcccagcaaggctgaataatatctgtggatattcttttctatttcttaataccctcgcattgcttatgaaaatcctatgggcacattgtaaattatctgcaaaaaacagcagagtgcaaagaagcagaaataaaacctcccataatcacaacagaaacatctactactgttcatgattcgttttattttcccccaaatatattactgtgcatttttctttataatgccgagatcctagaatatgtgcgatttagtgttctgcttttcttcttaacattacgttatcagcatttccaagtgacactgggactctataaacatattttaaatgactatatcttatatggatgctcactccttttccttatatttgctctttactttttcctcttttttgctattataaatagcattgtactgaaatccttctgcagggttatgtacattacctcattggtttatttatttaacagactttgagtatctacaatgtgcaatacaatgtgcttttagttctgagaggaaaccatctgaaatagcaaaaagagacataaatgaaatacctcacatgtagagttttgtgatactcttttttatagtaagtatacctggcttggagtaacactgtgggccggttaattgttctgggcctgaatttctgcatctttagtcactagatggtttctaagctgcctcttgtctccagcactctgtggtcctgactgcaaatgtaagaatcaccgtagcattcatctatccttgtgactcactagggctgtttgtgtttggagcattcctggtgcacagatgatgtgttgatggacttggacacagtctgttctcttcccctctcagtcatgagcagagcgttcatctgctcagtgcttctttttaataagtagttcaggggttgactgcagctcagctctgttgggaattaacacagacataatagacttttataaaagtgtgagcagagcaactaagccagtacagactctttgccacatcctgacatgctaagagagaggtcccctttaaaacgcaagcagggtaaatattagaaaaatggcaagaattcatagagcataaagctcataataaactcagagaatgcattgtcctgagaagtggtaaaggaaggaagtggaatagacttcaacaaaatggcatagaattaacggcagagggtatcatgtacctgcagggtatttgaaccgggtgattttgtgtggcagtgcccgggatccacagaccctaatgacacccaaatttgtgaggcattcttctcagtttataaagaacatgactgagaccacctagcacatttaaccgggtctgaaggaccagctaatttcctaaaaatagcagtttcttgctgggcatatgtcttaggctttgctggctctaagaacttaatattaacaattcacacagaaggaatcgtgttcagggcattgaccaatactcagctcacctttgaatggccagaggacacagctctaaagaaaggtgtgcaacaaggagtgtggttgagtgggcatgttatcttcctaggtcacaagtaacaaagtgccactccccaactccatattcataacagacatccataatctatcaggatgttctttctagccaagccaagatgcaacttcaggatcttttttaacacagtgctccaggcagccactaccacacagatggggttcatttgctcctggaataaaaccttgtcatccctagacatagaggcagtctttcccctgtgagccacagcatatgagaaaatgtcaccatctagaaggttccttggtaagcacagacatatggtggcctgataaattgcctttctctacccttgggatctttgtccaaggaactaggtgccatcttgagtcagactggcaagtgtgggaaaatagaattcttattcctatcagccaacagaatcttcagtgtttcgtgttatgataaggagttacactgcagacatttctcagagggtctgttcctgtgttttatcatgttttccatggcaacccctgtgggatccacgaagttggtattatctccatggcacagatgatggaggcccaaggaagacaaatgaccggcaggaggcaagtcatgcagctaagagcttttcctggaatccaggtgtcctgccttcagatgccagttctcttgctggttttcgtttttgtttttctaaaaatgttttcacctgtcaagtatgtgctactatgaattctgggagggtagggtcgtgtcttatttatttctgtgtttttgactgcttttcctctccaatctcaagtgctgtgactaacacataggaagtactcaagaaaatatttatggcatataagtcagtagaaaatccattcattcattcattcatggaagaaacaaggaggtgccccgacctcttttgcatgctggcctttccaagtctgcactgggattgtgccctgagctttcatcataagagcagggttctggctgtgaggcttacctgggcacatgcacctgagcagcagacgatgacattatcagtccactggagacattttcttcctcataaaaaggctagtcattaaatccttatttgcagcctgtgacagcaggagccaaaagcctctgacccgctcaggacctggggttagagctgcatggaccctgaagagagggatccctgtgctaaggccttcggacagtggccctgaccgagcagcagagggaagagggcttagggagcgggaagcaccaatgctgggcttgcaaagggcagagcagcaggagagaggctggcataggagggaggagggctcacaggagtgggaggtggattggatttagggccatcaggaggggtgggaggccaaacagctcagctccccagtccctttctggggccatctttgttttctgatttataatgtgtcccctttgcggatggccttttgacatgtgctaattataaattgtcctttggtgcattccgagagttctaataattagaatttctaattccagtcctctgagctgctcccagcagcctcatcctgtgagaggagcttgactcatttgctctcctgctcaaagtcgctggaggaggccagcaccgtgcggcctggaggaagtatccaggtttgggggtacgggtggaacttctttctgcaacccaatacagataacccagaagacccttctctttgtggttgtggtttgtgttgaagaggaagattttgaagtcaaattgacagggcaggatggtctatgaaaaagaaccctggactctggttttagtccagccagagcctcactgtgagaccctgagcaaggagatctttagacctcagtttccttggcataaatccaaaggaatcagatctgtgattgccaagggcccttccagttctgagattatttgaatctgtgaaatgtgcatatggcgtgttctgggtggaagtcctcaggtcatgttttgaccctgcttgtactggctacaggactttgtttgcaggccatgtgataacaagatattaagtgactttgttaaaggtcaaagtaagaacccaagccttgtgcttttttttacactgccttattttcatcattaatctccccttgccttggtttcttcatctgtaaaatgggaataataatacctgggagattgtattggtgaaagctctatgtaaaatgcagaccactaagcgtgtgtaaggatcttaatttcacttctagcctttgggagatgcaagttacgatttctcccctgcctccttcagcacgaaaccacaatcctaaagcatctttaggactgtatagtaatgtggcacctaggtttgtggtggggagaagacaggcactccggccccaactctgaagacccaccttgccttgcccagggagttgccccttggggaatctgataaatgtagatgtcagtcttgagaagccactgggcacccacctgtccttgtcctctttcgtaatggtgagcatgcttggcatagtgtagactttcactggtacacaacacgtgcactcctattatctcatttacagatgcccgggagggggacaagttgaggcacttagcaaatagagcagctgggacaggaacgaaagctcctagctccaggaaagagtcaagcagcctcctgacatcacccacacctctgtgtgctccttctgcagttgtcccactctgtcctccagggcttctcccttctaggctcatgatctgaggctgccccttgctacccaggggcaaaattgttagtcctggaaggctctttaaaggtcattgtgggccaggtgtttcagttaactgatgataggatgggggccaacataattgaatagttcccaagactgagcagcttgctcaggtagcctggctaaacccaccagctctcccggccaggccaatgtcctttctctgacaccctattgcttttctttccttacattctctcagggagtcatatacaatgacagagaagtccagggctctgtgttgtttggctgtccagtctttgggagagagagaaaaaaaaaagaatgtggaacctccagacagggcacaccctaccgcgccccatgtgagtttcctgaggtgctgtaacaaaggaccatcgcctgggtggctcacacaaccgacagttaccttctcaccctgctagaggctgtaagtctgaggtcaaggtgccagcaggattggtttcctccgaggcctctctccttggctcttgtagatggccgccttgttttccctgtatcttcacatggtcttttttctgtccatgtcctaatctcctgttcttataaagacatcagtcctgttggatgaaggcccaccctaatgacctcatttaaccataatcacctgttcaaagaccctgtcaccaagtacagccacattctgaggtcctggggattaggatatgaacatgtggatttgcagggaaccaattcagtccgtaacactctctctcacatcatgccgtgtgtgatttacatgtctttgctgtgtgtctggctcttgtagactttgcgttttcacccctgtcttcctgttggaagtcttggtgaatgatcaagggagaatgtaggccccagaatggaaggagtgtctcagggacattagagagagggaagcagagagactgcccacccacccttcatcattgtgactgctctaaggaccggccctgggtgaggcggaggaggagcgcacctgttcagaacgcagcgaggctgagcggggagctagctggcagtccttctagggagtgtagctgattaaaataattatattaactggccctcaaagagacttatttatagccatggtgacacgttattaaggatctaatttggatcaggactctgggaatcttatttttaggcccagaagagagccctgcaggcaggtgaccaggaggtctcagatggctgtgtattcactctgtcgagtcagggattctcaaggtgggaggcaattggaaaggtcgcactggcccacccttcccccgatgtctgtccccctgctccagtgtcccactgagagaccatccacctcttcttaaatgcctcctgtgccagggagcctgtttccatccacggaggcccctcctatcttgtgaaagtcaggctctactgaaaagcaagagagagatttctctctaaatcttctgtctggtggttctggtctccccctggggatggacagaatacatctgaccactgggccactctcttcaggcccttgaagacagggctaaagctcttcttggcctccactgctccaggctggggcccccagttcatcagcccccctcaggagataattgcaagagccttcactgctccgtttctcagaggatgtgagtgttcagttctgcggtccagcaactcctccaatgcctgcctcctggggatagctgtaattctgggttgagatgaaagttggccagttgaagtcaactggcctttggttgagggcctatggtgaaaacagacttcatctaaaaagaactcagtcagcaggcacctgcactttggaatcagggaggagaaagatggagactaggaactgacagaagggttttcctcgtgtgaagggcagcaccaggccatgaggtgacccagggcaggccacagccgtggagggttagggtacagcaccctggtgggtggccccgctgggaagtgcacatttgggttttggtttgccaaactcaccctgcccaatcctagtacgagcccaccatgaatgtcagacagcatagagtaagtgcacctggagcccatcctgagcccttgagctaatgtcttcactcctctgatctctgggttccacctgcctcctttgttgtttgaagggtggaacggactgatgcctatgaataaacacaagctccagcgctctccacagatgtcacagatgaaagactaaaagctgcttctgcacgcacagatatttatattgtagtgccaaacaacaacagaataaaaagaaataatttttagatgtgggaaaatcagactctagaagatgttttataggagctatcatggtaggatggggctaattttccaaatgcctattttcctctgcttccttttaaagttctctctctttttatttttttattaaagcaaggaaataaacagtatgtgtgtgtggtgtgtgtatgtgtatgtgtgatgtgtgtttagtatgtatgctctctgtgtgtgtgtgatgtgtgtgtgacgtgcatagtgtgcctaggtgtgctatgtgtatgtgtctgtgtctgtgatgtttgtatagtgtgtgtgtagtatgtgtgtgtggtgtgtgtatgtgtatatgtgatgtgtgtttagtatgtacgctctctgtgtgtgtgtgatgtgtgtgtgacatgtgcatagtgtgcctaggtgtgctatgtgtatgtgtctgtgtctatgtgatgtatgtatagtgtgtgtgtagtgtgtgtgtgtgtggtgtatttgtgtggtgtgtatgtgggcagtgaatatataatatatgtgtgatatgtgtggtatgtagtgtgtgcagaatgcgtggtgtgtgggtatttatgtggtgtgtgtgtgtggtatgtgtatggtgcatgtgtgtatgtggtacatgtatgtgaatatgtgtcatgtgtgtggtgtgtggtgtatgtgtgtgtggtgtgtgtatgtggcattatgtgtgtgtgatgtgtagtgtgtggtgtatgtatggtgtatgtggtgtgtatatatatatggtgtgtgtatagtgtgtgtataccacttgtatgtttatgtgtgtgtatatatgtgtgatgtgtgtatagtgtgtacatgcgttgtgtataatgtgtgtatagtatgtgtgtgctgcgtgtatatttgttgggtgtgtgtatatgtgtggtatgtacgtggatggtgtgtggacaatgcgtgtatgtgtgttatgtgtgtatgtgtgatatgtgtatataatgtgtatgtgtgtatagtgtgtgtggtgtgtgtgtgtagtgtgtgatgtgtctatatgtgttgggtgtgtattatgtatgtatatgtatagtgtgtgtggtgtgtgtgtgtgacctgtggtatttggtatggagtgtgtgcagtgtatggtgtgtgtgtagtgtgtgctgtgtgtatgtgtatggtgtgtggtgtatggtgtgaagtgtgtgtgtagcatgtattgtgttacgtgtgtggtgcatggtgtgtgtgtagtgtgagttgcattgtgtgtggtgcttggtgtgtgtatgtgtgatgtgtgttatgtggtgtgtgtggtaagtagtgtgtgttgtgttacatgtgttgtgttgtgtgtgtagtgtgagttgtgtgtggtgtgcactgtgtagtgtgtgttgtgttacatgtgtggtgtgtattgtgtgttgtatgtgcgttgtgtgtgtagtgtgagttgtgttatgtgtgtaatgtgtgttgtgtagtgtgtgttgcatgtgtggtgtgtattgtgtgttgtgtgtggtgtgtgtgtagtgtgagttgttatgtgtgtggtgtgtagtgtgagttatgtaacatgtctggtgtgtattgtgtgttgtatatgtgttgtgtgtgtagtatgagttgtgttatgtatgtggtgtgcagtgtgtagtgtgtgttgtgttacatgtgtgttgtgtggtgtgtgtatggtgtgcgtctatccattggatgagccgggctgcctctctgagggcaggaggccctcttgcctgcttcattccccaccccggttttctcctcactgcctcagctggcatagttgtgcttgatttagctcaaggaacaaagtaagagaatccaagtttttggacaaaacaaatgcctagaaattgtgcttctaaagaagtagtttttgatggctcttgtagagaaaccctggttgcttgaaatgaggtgagagtttcccaagttagaccccagtaagatggcggagcctgcacacaggctttaaaaatgattaaattactcgttcagtatgatcaggattatggtcaagtgccttctttctgctcttctgtctgacttgcagctaaaaataaaagtcaggaattagattcttctttttcttctccactgaagagcaccctttgtggtcgctggcgctggttaggaggagatcccctgcccagagccctcatgtggggacaggatcttccggcagcactgggtgttcaaggtagggtgccgggcctttggtttacatttctggatgaagctcttctgctgccctaccctccctctgtctgaggccacccggagtcttccctttgcggcacacagtaagcagctttagtgacacgtttccgggcctcacctcctcagtttgctgagtctccattacatctgtggcaccgtttaagcagcccataatcatttgtggggtaaattaatacagtacatgtctcaggccctcccccaggattggcatagggaactgagaattccacctgtttccctttcctggatccttgcagttggtgaccagtggagaagatggccctggggtttcctcctcagccccaaattcctacatccctccaaaagaacctcagagagcaaaggcagccggacgcatccgaccctggcctccttctcaccactgctgacagaaggagcagaatcttggcagcattgttaggtcttcatctgctattagctgattaaaaagttaaaaaaaaaaatctgtatccctgggtagcccagcctgttccttgctgcagttgaagactgaccgaggagctatcagcggcttcccggccactgtggtgccatttttggcctcaaacccattgtgaattgctatcttttcccccagccatcagccggaagatccattaacaaattaaaattccctctagagtcagaatggctttggtttctgggttctaaatgaccttgattttaattaccatgccatacaggtttggaagaagacaccatcactgaatccctggctccttgctgaggcagcagagagctggggtattcagtttggccacacttctgggcttgtgggtgatacctctgaagtccttattggtttctaaaggtctttgtgccactcccagtttctcagtcagctgccagtgagttcacacacctctgagaactcttccaggacccccagtaagcttgctctaggccccaaggagtcccctctggcaaccgttatattcagggacccttctcaagacaaatttcttgaggagacacagttctggcgctgccctctaaacgctgtgttttccttaggtggccaggcaaactgtccagagtggtgtctgctcttcacctcatcttgaaggtggacgtcttgaccagaaatcctccttctccaataaactggaaggagaggcttctaatttctgtaatgtggggacttggatggcgtgtggatctctaactgcatcctaagttgtctaatattgataaaccaaggagtagcggggttcctattgtggcctttgaaggtattgggtggagagaacacaggatgggcaggcgggtcctacaacagtcagcaaagtacatggctagagcaaaagaaaccttatgcaagtgcagatttgggactcaaaccattcaaccttaaggtgcttggggcgaagtggtcggggagggtggtggggattgtgaagtgtgtgacttgtctgcagaatttactgttctctgctttcattataagcctcttttctcacacagaagagtaagatgaagcatgcagagaccaggttgggttaagactctgtactaatcacaagtagtgcaagaaacatttgctggacacctactgagtgctgggaactgggtactcaacacatctctgtgaggaagggactattatcatttctattttcttgatgaggaaagggaggcactgtattagtttgctaggcctgctgtgacaaagtactacaggccaggtggcttacacaacagaaattaattttcttacagttctagaggccagaagtctgagatcaaggtgttggcagggctggttccttctctgggttgtgaaggaaggatcggttccaggactctctcattgccttgtggaagactgccttcttctccctgtgtatgtatcatctccctcctgtatatgtctgtgtcctaatttcctcttcttctaaggacaccagtcatattgcattaggacccaccctaatgacctcattttaattttatcacatctttgaataccctgtctctgaatacatcccattctgaggtactgggcattaggacttcaatgtgaatttttggtggggaacataaatcagcccttaataggcacagaggggctaagtaacttgtgtgtagacacagagctataggagaagatggcaggcattctgactccagaatcccctggttctgacagaatcccctgacagttctgacagttcgagaccagcccggcccacatggtgaaaccctgtctctaccaaaaatacaaaaattagccaggcatggttgtgcacatctgtagtcccagctacttgggaggctgaggcacaagaatcactggaacccgggaggcggagtctgcaataagccaagatcgcaccactgcactccagcctgggcgacagagtgagactctgtgtcaaaaaatttaaaaataaataaaaataaaaataaaaacaaggaaacaatatgattgtactattcaaaggataatacttaatttgcaaacttcatattaattcctagtgtactaccagaatgagatctggtaacaggataaaagtttaaatcagatgatcaatgccatattttttccttccatgaatacatctccaggaatgtgtacataacctaatcaggaatagcttcaaggtcaaaattcgtggtccctgtgaatgtagaactcggcgagtggccaagtggccctgctgtgcctccctgcccttttggagcagcctttcagaaacttctggactctctgaccactgtcctctctcaagtctggaaacttgggaactaaccttgacctcgagttggctttccctaggggcaaatgcaggcgctggtggaaaaggctatggcctttatagtctctggcagctctgtgtgtccacacaactgtgatgctgtgacatagagttctgccactggattctatgactgaggatgaagtccaactaaattgccatgtctggaaccctgttggatcatcgcactggcaccctggagtcccttgggatcccctattcgctcagcattacatctgctgagcactgctcagtcaacattagtgaagacaactgcttcggagacggactttccatcatcaaaaaatgcaaccaacagagagcttgattaaagtgtagttatttggtgtgaaacatgtcctgccaacagtgtggcagtacagacatgaattaagatgaaaactgacacagtcactgagtctcagcctctgagaagcagctgcaatgtaagagtttttttaaaaactggtgaatctataaggccaagagccaggagaggtgatggtgcacatcaaatggaggtggcaatggctttatgacatggtgcccttcacagtctggcctagaagtcaccttaagatcacaggctaggctctgcgttcctctagctagatttttcctagcacaggggtctggctttcttttttcttttctctactttttctttttttccttctcctcttccttttcctctcctcccctttcccccctccctcccttttttctttctttcaggtcctgtctatctgattgcaacttcactgcctctagggctttcaaatcaaaggtgataacctgcctccctcatggacatcagcatcccacgtgacagaacaggcaagccctcagttctgtgaagggtggtcacagcagacggaaatgtcctgcacaggaggcttgtttgctcatattctcccctccttacctttctggctccttactctctcactagagctacattcagcctgtctcttgcatcagtctttctgtgactattgaagccttcaatggttgattatataatgcagtgaactcatttcttgtagttgattacaatttaacatatatgtaatatgtagtatttgtttgtgtacttgattggcctttgtctctcactagagaataagctctttgaggacaggaatcctttctgcctatttcactattgcactccagagctcatgcagtaggttctcaatgcatgtttgttgaaagactgagtgagcatcgtttgggctctctaaccatcctctgagatacatgggtggctgtgtcaattgggctttggagatgaagaagcagctagccagcagatgatgcaggcctgggctttcttagcacagtgtgtttggctcaagaggaccacagtgatatcagttactcccctgcccacagggagcttgctctctagttagggagaccaggcgaagtgagggagagtgggtgtggagagtccatgctaggcactgaggatcgaggagtgagggcagccaggcttcagaggggcagagaggtctgggccaggaagaggtggatgcagccctgggcctcatggtctatttttgccttagttcctgatgctcccgccaagggtatgcccttgctgggcatcctacttcctgcccactgagctcctgccaggaacactttcttgggatggtcccattttctgccaagggtggatttggatctcttctttccctcttagcatcccatgggtgtctccataggctgaggcaggttgtggactgcccagccccgggaagcgtcacacatctagaccaccatatgggcagtgcctcctgaagctgtgcaatggagcagccttgggctgaaggatggaattgggaatctggcttggactggttcaccctcttaatgtaatgtataaaggaagagaatattcctagggagaggctacccctcgaccagtttttctagtctatgttggagggagcccacactcattaaatgcctgctgtttgccaggtgccgatagggtgctttgtatatgttaaccttattcaatcctcttgatagccctctgacactggcattgttattatccccattttgcagatgagaaagctgtggttcagtatgtttaaatggctcacccaaggcagatacagctagtgagtggcagcatccagaatcaaactcaggctgttctaactccaaaactctgagtatttctgtaataccagaattccttttaagacctgggaaaagcccagcagccccaggaggtgccatcctggagccagaaggagggaccagcaaagttgccttaccatttgcattaaaacaccctccatagctgtagactgactggtgcccctgggtctgcaggtaccagctttgcacttagttgaatctccagccttaagtgtccttcccaaagcccagggaaggcaacgcagtttgctgcagggatcgtggcctatgcaaaggcctcattgccacgctcagcatcatcagagactgtatgtttggtctctggatggaggccgagagggactcaggcctggccgtctcagaacttaatacttgagttaccgagtgtgtgtgtgttttattttggggtgtgcttaagtctctcatctatttttgttttagaattttggctattcctttgttacctacccaagttgatttatacacggccgtcgtcctgtgcagaaggcaggtaattggccacttcagccctgggctaatggagggaagcaattcatttgatgaaacaagttaagcaataatttagaaactttctatctgaacccttgtgatatcatatcctcccagatttatcctcttaactctgtccaactcaggcaatagtcagaatgtcttttcccttcctgtcctcacaccagtctgggtcagctgtcaaggacgtgggcaccttgaggtacttaaaagagtttctcttagagggccgggagcctggcttcccgtcctggccctgtttctcactggctgtgtgactctgacccactcacttaacctctctgagccccagaagccacatttctcaagtgcagtagtgatattgaatgtcccaaaggcaatgggtaacaccagaccagggatttccagatgaaatgctctggcttacttagcatgactcagacccgctgcttccccattagcaagaggctgctttataattttttttttttaatggagagatatcaaggcttaaaatgacattaagaagtcttcttcctgactgcagtgtgtccttcaaggatcatctccccatctacctctctgtgtactaatgactccaagaaagcggaagggggcagcctggtagaaaatggaaacgtttttctgtaaaggccctcccatgcttccgaggcctgcagatgaagggtctgacttgagcctctcagaacccaggagaaagaaacaagcctcactcatcctgtagcccagaggaagaaattctagcacccagagaggtcaagcaagtcctgcaaaaccacacagcaatttgatagcaatagctggaccaggaactcagggattttgactcctaatcttgtgcttctcaaactttagtgtgcacaggaaatctgaggatcttgtggcaatgtatattcgggaggtctagggtggggtctgagattctgtttttctgatgagagccctggtgatgcagatgccgctggtctctggagcttacttggaatagcaaggggctccagaaagctgggaggctggggtctttgcagcccaatctaggagggagtagcccttccagctcctgtcgcctgtcccacttcctgttactaatttgcatgttgcctcctttctttccctcatgctcctaaggcctgggcactcccttctctgccaccccctatgcttccccagcccattttctctggttccgtcttgctcagcctttaagtaaacagcacttctcagctgggttgcatgaggcctcctggctcaggagtctgctgctctgggctcacagtccctgttccatggagatttgagtgcctgaattaactccctcttggagcaataaaccaccctgagtgctaacctagtttgtatttttagcgtgtgctccatcaattacttaacttgcagagcggctcctctctgctcatcagggaggtgccaccaaagaatgttcttcctcaggcttttgtgagttgcccctctccttggtcccacctcctgtgaggtcagagtcctttctccttgatgctgtatccttggtatttaggaggcaaaggttattcaccccgttttatagaagcagaggaaacactgaggtccagatagggtgacaacacagtacagtgtgatggtgccaagaagcaggtctcctaagcccttcaccttcccactgtggggaggtaacaaatgatggtgggtggtatcttcccaggctacgcagggccaggaggctctctctgagccagttttgcaagatagtgatatgaagggaagcaggtgggggccatgcactgtgttacctcaggtagaagtgagctcctcactgtggtttttacttgtaaagtccagccagaaaacctacatgctgggagaatggggccaggaccactttagtcagtggtttcttccaccttctccccaccccaggaggaccttcagccatccctagataagtcaagacttggtttgagtttcatcgaggtttctcccacctctggcagaggcatggatcagcaacactccaccaagaggccagcaagatgctggctgtttcccaagctgggatggggtgagagagtatggcttggaaactcagaggtgatagaggcagcaccggcttcctgagccaagctctccccatggacccaaggcccaggcatgagacgacttcattcatccgtccattgaggaaacgtgagcactagttgtgttcaagacaccaggcagatgctgtgggtgggcgggactctctcccgggggagagcccagggcacagtccctttcccagggaccttacatcttccagggaaagctcccatgtctgtctgtaaaggtaaaagctaaaaacatcacacagtgtgtaagtgcatgtgtgagggtgtgtgtgtttatccatgtgtgcataggtatataagggtctctgtgagcacatgagcatctatagatgtgtgtatgtttacgtgtatgtatgtttacatgtctgtgtgtatgcatgtgtatttatatgtctatttgagtgcatacatttgtgtttgtttgtaaatatatgtgtttttacgtctaagtgtgtgtgtgcacatgtatgcatttgtttctccatgcatatatgtatttaagtgtatatatgtttctgtgtatgtgtgtgtgtgctcatgtgtgtatgtgttagcatcagtgtgggtatacatgtgtatatttgtgtttaggtgtgtgcatctatctgagtatatgtgctgtgtgtatttatgttagtgtgcatgtgtctgtgtgcctgtttcattgtgtgcatgcgtgtatgtgtgtgcatgtatgtgtttatgttagtgtgtgcatgtttctgtgtgtgtccgtgtccgtgtgtatgtgtatgtgtgtctgtgttgtttatattagtgtgtgcatgtgtctgcttgtgtgtgtgtgtgcatgtgtgtgtctgaatttgtgtgtctgtgagcatggtactttgggctgtgcctctgtgaagccccatagtcagtggggagtccccacacagccctggctataggctgctctggaatttgcctttgatgacttagataggcatgaacaggacatgtcccctggggaagatctgtgagtctgtcctgggtgtccccggggcaatgggcagactcacggggaaggaagaggaagacaaagcacacagggtcaacactattgcatctggagcgtgcctgggcccatgctggatatgtgacagactcagaagtgagccagacctgtctagttggggcaacaagccccgtaagtgttctgcctggaggggtgctgaggcaggaagtaaggaacctctgtggaggggtgacctagtccagccctaaatcaagggtagaaggctgggtgatctgtgtccccactctcctcagtattgaaatctccttaagcccaagactgtactgaatcatgaatcaagacacatccatgtctggtcctgactctgccgtcactgtgtgaccttgaataagtcgcttggcttctctgggccttgcttccctccctgtaaaatgaagacattggatcatctcatcatttaacaggaacaatgaaattctacagcgaaacaagttgccccacaaatagcagggtggggcaagggtcaccacagaagagcaacttggaagtggtctaaggatgtggctaagaaaagagggagggtccagggaggcctcttttttgaaaaaaaaaaaagagggagtacaagtgcggttttgttacatggatatattgtgtagtggtaaagtctgggcttttagtgcacccatcacccaaatagtgtacattgtatccaataggtaatttttttttttcttgagacagagtttcactcttgttacccaggctggagtgcaatggtgtgatcttggcttactgcaacctctgcctcccgtgttcaagtaattctcctgcctcagcctcccaaggagctgggattacagtggcatgccaccacgcccagctaatttttgtatttttagtagagatggggtttcaccgtgttggcaaggctggtcttgaactcttgacctcaggtgatccgcccacctcggcctcccagagtgctgggattacaggcttgaaccaccatgcccagcccaataggtaattttttatcccacaccccctcaccgtcccactttttggagtctccagtattattattccattctgtatgtccatgtgtactcagtttagctcccacttataagtgacaacatgggcttttagtgtacccatcactttctgtctgactttgtttctgagttagttcacttaggataacggcctccagttccctctgtgttgctgcaaaagacatgatttcattttttttctaaggctgagtaatattccatggtgtgcgtgtgtgtgtgtgtgtgtgtgtgtgcacgtgtgtaccacattttctttatccagccatccattgatggacacttaggttgattccacgactttgctaatgtgagtagtgctgcaataaacatgagtgcaggtgtttttttggtctaatgatttcctttcggtagatactcattagtggggttgctagattgaatagtagttctattttgagctctttgagaaatctccacactgtttcaggaaggctacttgagcttggtcttaaaggatgggtggagagggaggcagagagaataataatacaggaagaatctgagaggtgggagagcgcagcagactttatcaacgaacattcatatagcactcactgtagagcaggaatcattctaagataggggttagtaaactatggcctgcagggcaaatctggctcactacctgattttataaataaagttttattggaacatccatttgtttacatattgcctatggctggtttggagctacaaggaccgaagtgagaggttgtgagagtctgtgtgacctgcaatgccatagaatatttgctatctggctctttatggaaaaagtttgccatccttcttataagatctttaaaagcatgggctcatttaattttcttgacaaccatattggaaagttattgttattgtgtccactttatagatgaggaaatgcaggctcagagagatcaaatagtgcgcctaaggccacgcagtgaggaaggaggagatgagacatgacctcaggcagtgggctccagagagtctgtgttctggccactgtgctatgccaagagcgggcccctgggaggaaggctaagctgtgaagattttgggtgctggtcttcagagcactttcttgaccttgccaggtttgtgaccagcacagtgatgtctcaaagctgtgttttgattaccacaataatgtgggtattcggggaccagcctgcctaatggggacgctcagtctccaactgtgtctctcaaatgctagacagttcttggaggcaacacctacatgctgttagccaggcactgctcacaagggtttctccataaagatttccgattttagcttattagtcagtgtttgtatagttgctgcatgctgtggtctgtgtcccagctgcctgctgtagatcacaaatgcttggaaggcctggattgtgtctctctctgtgtgttgtctccagggagaatggcttgtcatcaggtcagaggattctggggccacattcccattgcgaagaagctgtcaaaatgcctgcatccagaggtgcttcaacaagagcagaggtgatgtgcaggaagggctggtgattgtggcagaggctgtgaatgccctgcccatgcccccaggccactctattcctatcccactcaaatgcccctactgtcagtgccttccctccccctaccagtgtgagccaagacatctggaagtgcctgcagcaaatacccccaggtgcagcccttgccaatgatagaccctaatgggagtataaataccccagattctacccctcagatgacacagctctgaggcatggtctatgccagtgctacccctatgattttctgtaatgatggaaatgttctgtatgtgtgctgtccaatatgatagccaccagccatctgtggttattgagcttttggaatttggctagtggactgaggaactaagtttttcaattcaagtaatttaaatgtagatagctcaatgtggctggtgccttccatgttggacagggtggttctgccccatctcccagaggtctccagtggcattgagccttggttgtctgcagcagtgtcctgaccattaacaaaccctgccctctcactttcccattttatttccccactccccagctggttctcccctgggatcactacccaaataaactattcatgtaagccacatgaaattgccatttttgaggttaaaaaatggttgaatgtcagtattttcaaatgattaaatttgcactgaaatctctaccatgcatgtgtgtctggggaaccccaccataacagggagttgagattcgtgtttgttcatgtgtgtaagttgaagtcattccctgtccaggcagggttctaatcccagctctgcttccaagtggctgtgtggccttggaaactctctgtgccttggtcctcagggaggaggacctgcccatacccctggccttggtgcctgccctatctttagaatggttggaaggaacaagggagctcatagatagggctatttgttaaaagaagccagcacagtgaggagggaaggtgccctcctgcatgggtggggccattctggggcacagtgccctggctgcattatccctgggtggaggatgcctgcttgtggctgatggaattcagacagtgtgtttctttgatgctacaagactggctttcctgctgccccactttgtataatcgggtctttttggcagggaggacttagtagctagcgtgagctcccaagtaggaactctaggaatattcactcgggctgccgtttgatctgagcaagagcatgatttgatgggaggctgctctgggccttacatttgtttccctcatttagaaaaaggcagtaaacagtttttaactacattgcgattgtgaggcttttcctatataactttttttcctggaatggaaccagacaggatggaggcactgcactcgcaggcaacatgggttttcccagcccctccatcttcttgaccttcctagggatttgttaattcagctcagattggcctttccaggaagctaccaggctctcagaatgcccgtgctggagggaggctgatcccaccagggaccccagaggaaacccagagttcatgccaaaatatctagtagaaggagtttatatggggaactagttataaaggtgtccaaggagataaaaagccaagcaaaaaatggagaggcagcccagagaatagcaatggcaggaagctgctagcatcctagggctagagggggaagggaggagctggttttctagaactcaggatccagcagcacctggcggatgctggaactacagaaggcctgctgggctgggcaggatcacagaggaaaggactctggggagggcaggatacccagaggtgatagatataatgatggacatgttctctatctggagatgccaccaaatgcagaaggagggagaaatgtcctggtttctgcctgcccccaccctgcagacttctgcctgcattcctgctgaatagaacaaacttccctagaagaaagagcgagggagcctggggagtgtagtccacagtctacagacgaggggtaaagactgggtctcagagcaagcaggccaatgactagcagggcggcccaagagcctttaagtgagaggctgtcatcctggggctgtgaatgaacttcggaggggtccttgcccttctaggaagtgcaggcatattttgtctctatgtaagcacatgcatttctccagaaagaaagttgatatcttcagattctcaagttggtctgtgccaccaaaagattcaacataatcaataaccagtaatccaaccagcttatcttaaacatgggaagtctcagggctcagagaaacacccatagcgacagtgtctatactcttggtctagggtcctactggatgttgtccttcaactgtcctggaagatccagcctgttaggagagtcccctgtctgttccctgcctctccagaatcaactgtgtcccatcttcttggtcagctttccctgatctcaagcacacagacctgcttccacagtgcacttctgcagcctggggaaaccacaccatggatgtggatcctggtctagatgcgccacatagtgctcgatgcaggcagagctggcactggaaagagggcccagtctcctccatgcagcctccctccttcagcaaacatttgccttgcacctgccatatgccagacgttttgctaactgccggggatatggcactgatcaagatagatgatgtccctgctgtcacggaggtagaagtggaaacagaaaacaaacaagagaacaaatgcagcaacaaggtcatttctgattatgataagtgtggagataatagagtagggggctggcagacagtgatgcgggtagagtctgggggctacttttgatgggaaaggtttctctccggaggtcctgtgcaagctgacatgagaaggatgagaaggagccagctttccaaggtctccagagaaagtatgccacatggggacaaaagccagtgcaaagtccctggggtgggaatgagcagaggaagaagaatccatgcctatgtggccaaagacgaatcctgcctcacagtctttgactcttttgacttcccctgtcgtgcctcctgcagactcttcttgcttccctgggagaatgggtggcaaagagtgccttccttagccatgcttccttgtcagcacagtgcctggcaggtggctggaagctacagctgaatttttgcagtgtctttgagatgccaggaggatggcagatcatttctgttcaattcatcagccacacaaaagccctgagatcaaagagcatgggcttaatttattttgtttattttgcagaggaaatagtgcttccttggactgaaagctctgaggactaagagctgaatggaaagggggcgtttggattaaatgaatgggctggccagctctgacccaatttccacccagtgcagcagtgatgggggagggaattgccttctggctctctgctctggcccaggggctggtcatttctcaggtctgggccttctgtgtgagtcaggtttgatggaagtgtccttgaaggtgattcatggggaagagaggaggggaaccgggagtagtggcctcaagccctgcctgagttcatccttggatccctcagcctttcttgacactagctcatcaccttagcaatgaggacaggtgcagattcaggtgaagctcacctacatttcataggagcctatcaaatgtgagtggactcggagaaggaaatcactgagcctcacatggcaaaggagcactcaaagtagggaattctgaggaagcctagaatgggctgggcagggagggcagggtacagtcccactcatcatcgtgaccaggctggacctgtgattgcagtgaatgagacttggccaggagaggcttgggtctaggagtcctgggttcgagttccattaattatttgaccctgagctggtgactttttctattttagaagcctcagcctcttcacatttttgagtaggagtaagggtagctgcctgtgcttgggcttggtgtgagagcccggttctgaagattggaaagtattgccaagcacatggtaggtactcagtaaatatctgtttacttaaatgaaagaatgcatgaataactgaaagagatcaaagctgatatattcttctagaactttatgactacagggaatgaagattaatatggcaaggatagggaggaagttaaagccaactgccacaaggtacctgtggtggagggtccagggttctagtggcttggcccactctttcaggtgccctcatctcagaaagatcaatggtgcagacagactgcagtttatctagttcacattggatggatgccttggatccacagccctaggatacttgggcccatttttggatttcttgctcttctagattgttttagacagcagtccatatgaagaccttaagagagaatatagcccaagagtgatggaaggctgcaaccatgacattttgagtatgctccactaattaaaaattaaattgttaatccccaagtaaagaaggaaaatgtgagggcatctgaagaagagagcatgttcgtgtatcgtgatcgctgatcaactctaggtttaacagacagaactttatgaatgaggaatgaggagtcatctaacttagggtagagtgaaagggggtcaggtggctaaaacacaaaactggtgaaaactgctaaagatagccacagacatttgtaaaattataggcagagaattagaagatgaacgagatgggagagtatcactgcttgggaaatgtgacactgttagcaaacagagaaacaaactagaaagtgagcatttctgttttttttctctctcttgtttctacctaggattactgtctttagaatgaaaaagagaaaatctcttgcacagagctagagaggcactttgaaatgcatttctaggaccagaggggctctatggctgggtcctgaaatacactgtagatgtggttgcagaagtggggagtcttttgatggactattttttcattatgggttcaatttttttgcctttttgaatgcctggtagtttttgattggataccagacattgtgaattttaccttgttggttgctggatatcttagtactcctataaaacattcttgagcttattttctgggacatgatcaagttgtatggaaacagtttgatcttttttgggtcttgcctttgagctttattaggtggaaccagagctctcttaatctagggctaattttttcccactacagagacgctgctattctcagtactctaccaggtgctctgtgagcttgaggtttccactctggctggtgggaaggtgaaccgttcccagccctgtataaactctgggaaatgttctgtctgctcctttagggtgtttctctcccccaccttggatagctttcacacatgcctgtgtccaccaatacttagctaaagactcaagggggtccctctgctgacctcaagtattcactgggcagttctttttgctgccctggcctgtgaattccagcctccttggccttgctggaatccagccttcatctcctcaactcagggagacatctgggccctgctggggtcctccttctttctgctgtgacttggacgctctctccagacaggaagttgaggcaactgtagggctcacttcgtttctcctctctcagggattgctgtcttcccctgactgagctccagtgtctgaaaatcattgtcttgtctgaatttttagttgtttcaggtgggaggagagatctagtccatgctacttctttggagaatctttgaatggtgagataagattatttatttatttatttatttatttatatttatttattttttacctctagcattctggaacttcttgtgcttgttagaatttctcagtgggtgtcagaagatggatgctgtaatctgtattctaatgatgtcgtggcttatctctggaaatactcttgattggattttaaaactgagtgcttaggagcccttagagaggcaaatgctggtcacaggggccaagctagactctatgcaaacaggtcaggctggaatccccagttatcaagggactgaagttaacctgaaacgtttcctttaccatgacttaacctaaggtgcatgataatgagtgttaactgggtaccaggcttgcctttacaccaggttctgtccttatagcaaccccgtcagctaggtacccccatccctgttttccagatgagattaaggaactttcccaaatttagggtctgaattcacatctgctcacccttaaatgagatgccgcattgggcagcatctttcttatcatcttgattagggaggatccaagagctggaacttgaatatgaatcagtaaaacaaaaacaaagaatcagacacaagataaaggatccctctttgtccctgaattgagataagaaaacatcatcagaagcagatggaggctaagtactgattcccagaaaaggcctcatttttagaagggtatttagagattattcagtccccaacttacagctgtggttggcagaagccaagtggccaacagctcttgaggtggtgtcatactcatgggcagacagaaacttccctgacaggattttcccttaaacctccatcgcatgaaaggactttttttgcgcatttataaagtgtataattactatcccagtagctagatgcaaccttgtcaattataaataaatcatcacctcgcctcctcatcaccacccaaatgtctttcacactccaatttaattaactcacttactttattctctaataaactttcacaaaagttaaccccccattcccagctccatctagcaaagaatgctggctggatgtcagccatgttttgggcccccacctgaatctccgcctcaaatgtaactcaaatgtgatcatctcccccatctggggtctcacatgaggacatgaggtatgggacatgaccaggaggcatggccagtcttactgtctggattgccctgggggtcatggcaggcgaaaagatcagagaatgagaaattccttcctccttccagaggccaggtgggagggcgggggaaagggcagggtcttgttgaattttgttaaaaagcactttgctctcttggaatgctatctcatgtctaaagcagccaagatcattaagtaaatataggatctgtgcttttattttcactgctattagcaaagtttgcaggaggaaagagacattgaatggggagtttcatcaaagccaggggtgttccacaggaaaatacttgttaggcctagtttcctgtggtgaaagtcttatacatttcaaatatgttttgtgactctccacaaactttttgtttcctgcaggtttgtaattgagatatatgccctggggagaaaaaacatccaggcatccaggtccttagaaatataggtgccctgataggactgtagctggcagacttgcccataaaacaggtgaggcaggtgcttgaacatgtgattcacatgttgcatagactgcctactcctgggcaggggcacacttggcctgtatttgaatacacctagacttcaaactcagtttgtgaatcacctcctttggaagctgtccttgcaccctaggctggaagcgagctttcgtcctctgaacttcaattgccctgtattcatacctctgtagttcgggctctgctcactttctacctgggatttgagttggtacatgccttctcacctactcgcctggactggactctcctttgaagacagggtcgaggttgaagtcatctttgtgacccctgcagggcattgcacatagcagatgtgacctctcgctggtggtcagatcaacttcaggggcacagggttcctctttttatctgcccgatggcctttgtctagtgtattgctcaggatgacaataagaggaagattctccccctgtttaattccgggatgtcactggtcaggctcctcttgtatctcaggggtccagggctgagggctgtggcttcagctgaggctctaggctaagccagtagggcttgtgtcttgtattattctgttctcatgctgctagtaaagacatacctgagactgggtagtttccaaaggaaagaggtttaatggactcacagttccacatggctggggaagcctcacaatcatggcagaaggtaaatgaggagcaaagtcacatcttacatggcagcaggtaagaaggcatgtgcaggggaactccccttaataaaaccatcagatctcatgagacctattcactataatgagaacagtatgggaaaaacatgcccccatcattctgttacccctgactgggtccctcctacaacacatgggaattattacaattcaagaggagatttgagtggggacacagagccaaaccatttcaggtctactactttggtaacctcctggaatgagtctcatggggcccttctatcccctgtactcatgatagtatgactctttgggtgggtctgaggctggacatgactggtggtgaaacccaaactcttattagagaaagtatatcctcttactagtgagataccttaaagttttgaaaaggaggctttttatgataataaaattatgcttttatgggagaaaacttggcaaatacagaaaaattataaagagaaagcaatgtctgtaattctgcaatgcagaaatcacatttgggtgtattttattattatataatgaaatgttattctgaaaacttagattggttaatatatataaatgttaatatgtatattggttaatatacataatatatgtaaagctttaaaatatacttagtttaaaaaataaatctgggtacagcggctcacgcctgtactcccagcactttgggaggccgaggcaggtggatcacctcagggcaggagttcgagaccaacctggccaacatggcaaaaccccatctctactaaaaatgcaaaagttagccaggcatggtagcgggcacctgtaatcccagctactcgggagactgaattaggagaatcacttgaacctgggagacaaaggttgaagtgagccaagatcgtgccactgcactgtgtctcaaataaataaataaatgaataataaagccaggcatggtggaggaccacttgagcccaggagttggaggctgcagtgggctgtgattgcaccactgcactctagcctgggtgacagagtgagacacattctctattttaaattaaaaataaataaataggccaggcgtggtggctcacacctgtaatcccagcactttgggaggccgaggcaggtggatcatgaggtcaggagatcaagaccatcctggctaacacagtgaaaccccgtctctactaaaaatacaaaaaattagctgggcatggtggtgggtgcctgtagtcccagctactcgggaggctgaggcaggagaatggtgtgaacccgggaggtggagcttgcagtgggctgacatcccgccactgcactccagcctgggcgacaaagtgagactccgtctcaaaaaaaaaaaaaaaattaaaaattaaaaaaaaaattgaaaaagtgaaatgaaataaaagtaacacatatggtaaacattgaaataacttataaaaatataaaatgaaaagtaaaagttttctgcccaccctaccccacccaccctaatcctggaaacctctctccaaagatgtctactctttctaaattcctttgtatgcctgtgggtcctgggagggatgcatataccagcatttacatgtgtgaatacttagtttatttattgattcttaaacctagaaacatgtaatgagcatttccccttgtggttgctgacatttcaaaactatttttaatagcatcaccctagtttatcatgaggatatccagtctttattttctgttgttgggtgtcgagtttcttgccagtttatttcttattaaaggtaacacttcaaaataaaggcagcttttttatttaatataatttggtgtctctgcttatttttttcaggataggtttccagaaatgaaattattgtagcaaagaacagatttttttttatttcaatggctgtttgtaattttttttttttttcggagtcttgctctgttgcccaggctggagtgcagtgatgcgatctcggctcactgcaacctccacctcctggattcaagcgattctcctgcatcagcctcatgagtagctgggattacaggcatgcaccactacgcctggctaatttttgtatttttagtagagacggggtttcaccatgttagtctggctggtctcgatctcctgacctcgtaatctgcccgccttggcctcccaaagtgctgggattacaggcatgagcactgcacccggcctgttagtagtattttgttacatcaaattaagatacattttcaacagaaataggaccatttctcttgcccataaattctttttgatgatttgaagatttaaaaagtaatacaagaaaatatactattgataaaaatttcaaataatacagaagtacacggagggagaagaaaaaggggccctttctgaacctcccttctcacatctgaaagaaccctggaattggacagacctgaattcaaatttagatgtcgctgctgatcagttttatgatgttgcgagtcttgattgtctcatatgtaaagtgactatgtcaacaatagccttgtaagattgtggtgaggaaaaagtgaatgtgtgcagaggcctggccggtggcaggcactgtgacaattatcgtctttgttggtaggttgattgcctgttctctgtgtcatgtgtacccagcagactccagttgatatcaccctagaaaacaatttcctcattctgataaatgttggcccttttctgcaagattgctttaaatttggagccgatggaatcacaaggctgtgacctctccatgcaggagacagtgtttctagcagcttgaggggctgcagctgccccaccgagcttcaacgggtgtcctggtgcaaggttgtcctactttttgagtagcaaggtcttttcacccctttatgagaatgggcacactctggatatctatttctgagaactctgacactggagagaaaacaatcagttgagagaaatcccagcttggatgggcattcactgaacatccccttggaacatcagcctgctcaaaattttaggcatgacaccgtaaaccctgctatttatattgcaccagattctgcaaatatctttagtaacactaagccctcggttgttttaactgcgtctctaattataacctttttaatatttacagtggtgtcatgccatcctgattaaagtgccgtggtgagagatgctgttggcacctagtagcagcattgctgatgagaaggtgtcactaaagctgaccttccatcacttcttaagtgagccatcatttaggatggacacagaggtaccaatgagcccctgttcttgatcccaggatccaaaacctctcaggtgaggcatctccttgtgtgttcttcaggagccagcatgctgtgtgattcctagggagccagaggaagccatgctcttgtgatggcatatttatttcattggcctcatgtcatttggtctacctgatcagcagctgctgtgagtgtgcctgaaagagtggcaggctctgcaagagctccgtcagcaagtagaaatgctaaattatctcatgtgtttatcaaaggtttattgagcaccttttgtggcagaaacatgggctataataataatgaccattgattgaatttctggtgggagatgggtactggtggagaccagtttgagctcatgatgtttattaggaatccacctctgagaagggagaggcagaggccagagtgacaagagggacaagtcgagagctgatgcagcttccacaaaacctcggccaacccagcagacaactctggagtggatttatccaacagagatgatccctttgggcccaaattgctgtgcttctgtaccccacctcactctgtcaccagatgcaggctgtcccaggaagggtgaccttggctgaagctgtagctgaggctgagcctgaaggaaccgacagctgggggctgtttgcaaagccgtctccctgaagctgggcctcaagtccttcttcgaggtgaggttgggggcagcacatctccatggcatgcagagcttgatgaggagcttgagtttgacctgaccctgaagggcaagtggggctttggtaggcagagaggagcaggaagaacttgccagctaagcaaaacagtgtgaacaaaggtatggaggtagaaagagaggactttgtaaggaagtgccaatatggaaaacattgcagtgtggacgcctgggcagagaggctgtcaccttgagaaatggccaggggccacctctagggtgaccttctctggtgttactttctagctatcttctgaagcctgtctttcctgcccactctaaggaagtcaggtcaacttagggatgtgtcttcccaagtgacccccattggcctttgttggttgtcctccaagttattgccttgggcaactgggcagattatctgcatcttcttgcacagagtatggattttcaaggctcagctcatccttgactaagattgaggtgacttctagggcggctgaccggggccttgagaatctccctgggccctttcattcatttctcttcatgggctcttttggggtgggtgccaaggatctgggtacagcttccctaactcccaagcttggagaggccactctagctcttggactggcatctgggccagaagctaccagctaggcaacccatatttgctgggcatctaatagcccctcagatggtgaaaggctggtctttggcctggatggcttatctgtttcctcagacagctccagactgaagggacttcataggcagtgactctgtttagtttcactggtggtccaagggcctccttagctaggccctgggggaatcaggggctgtaagagtgggacaccgaacagaagtttcatctcatggaggcaggatttagaaagtgtagatctctttgaagagaggtttcagggagagaggtttcagggattagggtccagccagctccctcccgatgccagccttacctgctaagtgccttctaagctttcccactcaccctgtctgtgtttccagcctcttgtgtttatctctctctccagcccacactgccttttggccgaaaagggccataccttgagtccctgttgcatgaagttggatttcctttcatgtgtcctcagaggccctggcttgggtgttgtcatggcattttgtgatttgatggaggaggagagatagagcggccccatcgcctgtttgcgctagcctctctcagcttgaccgatgactgtgatgacatctgtggacagtaagcaggtccctggtgggattgagtttcctgagctattccatatcagcattcgagaagccagtacactggctgctaattgtgctagcttgtacctggggctgggtttgggtttcaggtccctcccttcctccctttctcccaatgcttggtcttattaggaaacattgcatcgctaaaataacaattactctacagatagagtaatagaagtgttcaaaggtagggttaattagaaactttcattaaaggaccttggaccttgttgcaattggtcattcattgatatttttctgatcaacaaatcaaccatagtttcttttgaataattgcaagattttttttatttttcatatgtgtgtgtgtgtgtgtgtgtgtgtgtgtgtctgtgtatgtgcgtgtgagagagagagagagagaatatggacgatgcagaggtggatggaggattattttctgttaaaatccccagcgtggctcagctcacctgtggggcctgcctcagctctgcatgccagctttgggctgccagatagtcttggagcttgccttatagaaagtggggatcctagccccatttttttcctgtggcttccctgggtttttctgaacatgaacaaaccttgctttccatctctaaacgctgctgggtggtccttgccgttgggattctggaattctggccctgtctggggtgagccttgggcatctatctcataggcactcatgcaacctcagttgggttgctatagaaaccaaatctcatggcctgctgggggcctgtttagttctttatgtcctgcctctgtctggggagataatgtggatggtgacactgttgttcactgctcaagtggagaattccctctatcacccaacaaggcttttcaaggacccaaccacagaagggactcggtaactcttgggtgtgtttttcctcttgctcggtgggggaatccaccttcaaagaggctgcccagctgctccctgggactcagcaggttcactggggctggtggtcctcaagtctttttgaatgccggggaagttcccaggacaatctccagagtggttaggaggcctggaattgataaccaccctgaggacagcccccgtctcaacatgggagacaagagaggcatatggcatggcattatagcattttacagctcatggaccagctgataggatagtgaatataattgccatgtgacaaactaaagtggctacaagtgagctaacaggtgtcgtttcattattaatttcaatcaaagtcattagttgctatttagggatctggctgcttggccacctacaccgtacttcatctggctgctacagcttttgaagaagacagagaaaagttctctttctctcctcctcctttcttcatccttggagaatttactatggcaaaacattgggtaagtctctggactaagtcttttcccagtgcaggagtctgaacaagtcactgcagtaattttgtatgctggcaagccccagccctattaagtaaggtcctgcaatgtgcttgtcacctttctaaattagagcctcatagtctcaaaacggtcctttgcagaaggatttctttttttaatgacttagcatacaggtcagtatcccatgtgtacttagaaaggatttgtaatctctatttcatatgcaggaagtctctctcccttttataattttaattttatttttactgataaataataaatgtacatatgtacatgtgatatttaatatagtcatataatttgtaaaggtcaaatcagggttattgggatatctatcatattaaatatttgtctttatgctagaaacctttgaattattctcttctagctactttgaaatatataatattttctaaactatagtcaccctactgatctatcaaactctaggtcttatttctgcagaagatatttttattttcattttagcattcagtatttctttatcacaaatctatccaaagattgtctcctttggttccatttgaaaagcaacctagaaagcactttagaggtggagctcagatgttgccatttctgaattagaaataatttggctcagaaaggttaaaggaaacagcacagttgacctagctaggaagtggcacagctaggaattgatccctggcctctgattccaaagcccactccctccatgttccacgagagccaatgcagtgccaggcagggtagattcctcgtgtgctggggtctctgaacttcatgaggggctgccattctctccaactggcagcgtctcaccctgccctccgtgttctctgtgaagcctagtccagccatactcccagcctaagaataattttccaagtcatgaccacaacccatgaatgctctgcagatgcccatgatggggggatagtgatggatctcaaggaggttggtggctatgctagaccatgaatgcagggcttctagacaaacagaaaccagtccctggcctgcaggagtgtcctggaagcctgccgggaccactgagaaaagctttccattgggaaaacatatgtaggcccctgggagggacagcctttccccctcttttgggagccagtctggcccctcgtgggatgatggtggcccccatgggctttttctttcacttgatttccctgtctatgtgtgtgtacccagccaccctggatcgtgggtgtcaccatggtatcctgtctctgagcaaacacatgagcgaaaaaacaaacaagcattaggaaggagggctctcccccacaccttggccacctatgcggagtgagggaccctgagccaggtaggaggagggaaggtgatggagattaaacagcaggtgtcagacagtcagggaaatgcgtttggattcacactggatggtcaggagccccaggtaccaaagtcaaacatgctgactcctgtggccacctggtcattcctcttgggtgtgaaggaggaggaggggagcgtggagaaaccaacaacttagcaaatgtgtgctgagtcccatgcatataggtgatgggagttggactcagagaaaagctgccagtaacaccccttagcaagcacttgctgtgtgccaggctctagatgacaacctttacctgctctctcgataggtcctcataagcagtccctagaggtcagtatcgttattgtgcccattgtacaggtggggaagctgaggcactgagcaatgaaacctcttgcccatgatcttacaactagtaaagtagcagacccaagaggccaagccaggctcatctgacttccatgccaggtccctgctaagattaggggtagggagaacagcttaggagctggggcaggagagtgcttatgtgtggagtagagaaagcccatcctagatggggaggtggcgggggtctaggtggcaaggggaaccctgggtgcctggcttcctcctgcaggcactgggaacatttgctctgctcacctcctggctctggatccagaggagtccattcctccaggtggctgctctcgcctgggaatggggtgggggtgagagtgaaggctgaatgtgggtgcagtgagtggtaaggtaggaaaagctgtgggtggctagagtgaggtcttggccccataggcaaggacatgcctaaagcaaacggacctttcgagtctcctgggtgatctctttcctaaaacccaccctgactctaagaactgtgagtgaccccagcacatctccttgctggcgcagttgagacagggctgtccctagctcatccaggacagttctgaagccgccctgaggctgtggtggctcaggtggaagacaatggcctggagggagggagtgaaatcctactctccaatcctgccaactagggaccctctctttgtttgcaagaccaaaaaaagaagaaaaaaaaaagatctcaggctattgtccaatgcttctatttatagctgccaaataattaagcggatcagcccttccaggatcagaaggggccatctagctggtggaccatatggtgagtctgcagggtcgcagagtggttaacaggagggaagagaggggagagagtttgtagagcctcttgttgatgttcatgcttcatttcttctcagtgtgtttttggtcaacagaaagattaaaaatagcattaaaaaattctgttctctggatataaccctgcgagggggtggggggactttggatcatatttacttgcttccctgatgacgcagagtgccaaattctaaagtccttaggatggaacccagctgaagacttccagctgaagtatcccccttcttccttctttggtcagtctctgaggagtatcatgaccttaacttcttgctttcctctgtcaagacccaaggactccttggccaacactttggggaatttattaattttctccctgcacccctagtgtatccagtgtgtcatcagcagacatttgggtcatgatgctcctctactctactgaaattcctctatgactccctattacttataaggcaaagttcagacccagcctcagctcacccttcctgcacccctgagccatcttcagtcgttcagggcccttcacctttccaaacatgagagctggccctttgaattttgattcttggccgggcgcggtggctcacgcctgtaatcccagcactttgggaggtcaaggaaggtggatcacgaggtcaggagatcgagaccaccctggccaacacggtgaaaccccgtctctactgaaaaaaaaacagaaaaaattagccaggcatggtggctggcgcctgcagtcccagccactcggagggctgaggcaggagaatggcgtgaacccgggaggcggagcttgcagtgagccaagatcgtgccactgcactccagcctgggcgacagaatgagactctgtctcaaaaacaaaaacaaaaacaaaaaaagaattttgattcttgctggaatgctttctgccctactctctcctgttcaagtcctgctcactctgcaaaagccagtgacatttaacctcccaggcttcctccaactcagaatgagctcacggtagaggggtttttttcctccccttttctggaccgttagagcaattttgtctgaacactttcatttgacaattaatcatgttctccctggcagcatctttcccactattatctcaaagaattatttaaatattttatcagcatttaaatcttcacttttgtcttgctccctcccctggaccgagtcttcctggaggtcagagagggggtcttgggcttctctagcaagcagcgttttgtggtggtcacctgtgcaggcttctgaaactgttgcccatgtttcacccttgctctgcctcttacttaaccctgtggccttaggaaagttttaatttctctcctcctgagttttctcacctatagaatgtggataaaagtcacacccaccttgtagagttgatgtcagtattaaaaacgtgcaaagcgcttagaccagggctctgaggtatctgctgagctccttagtatgcctctttcccctccacccagcatctggcccactgtcttgaacataggagatggccagaatttgcttgttttttttcctttggtgtggcgtcatttgtaaagctctgacccagagaggataggaaggtttcttaaggtcacatagcaagaagtggtggagaagctatggtgtcagaattgagagtccagcactcccagcccccgccctggccccaaggcctttcataggcagccctcttgcagggtctttactgtgcgtgggacactggagaaagctgctgtttatgctcgaacaacttttgcatgaatcagatggacttgaagattgccaccactctgcaggactccaggaggaccattcacattgcattctgtgggcatggtatccccttgaggtgtacgaagaggccccaggtgggaaacctccctgacaaccctcccatcccacgaatgcagctaaaagacacaggaggtatcagggccacagagtgagaataaaatcccactggagcaggtgaaagggctccgaagataggtaccgctgcccttttccgagtactgcctctcctgctgtcccctggccactttcagagagcccatgggttgacttagccttcagggtttagggagatattttggggtggtgagcttttcccaaatacccatctctccctgctttgagccaggggagaaatcagagctggttgggatgtgtgttgtgatgatgtgtgcagatgttcctggatcaacactctccttcctgcctgcccccttcccacccccatactccccagccacaaagggaatgggatgagtgggtttcagaagaggccaaattatttctaattcagaaatggcaacatctgggctccacctctaacgtactttctaggttgcttttcagatggaaccaaaggagacaatctttggatagatttgtgatagagcaatacagtaaaatttaatgtttatggtataatctaggtgatgggatacaggtattgtctgtgaaatcctttcaacctgttgtatgtttggaatcttctcttctcttttcttttcttctcttctcttttctcttctcttctcttctcttctcttctcttctcttctcttctcttctcttctcttctcttttcttttctttctttttttgagagagtctcgctctgtcgcccaggctggagtgcagtggcatgatctgggctcggcctcggcctcccgggttcaagtcattctcctgtttcagcctcccgagtagctgggaccacaggcatgcaccatcaccccggctaatttttgtatttttagtggagatggggtttcaccatgttggtcaggctggtcttgaactcctgacctcaggtgatccacccgtcttggcctcccaaagtgctgggattacaggcatgagccacctgggccactacactcggccttgtttgaaattttcttaataaaatgttgtggagagaaggaataaggactttgtagtagccaatcctggctctgcccctttttagctgtgttaccttgggcaaattacttaatgtctctgagcctcagtttcctcatttgtaaaaatggggccaatcttacaacatatcatagagtagtgagataatacatttgaagtacttctttgtttttttttttttttgagacagagtttcgctcttgttgcccaggctggagtgcaatgacacaatctcggctcactgcagcctctgcctcccaggttcaagcaattctcctgcctcagcttcccaagtagctgggattataggcatgcaccaccacgcccggctaattttgtatttttagtagagacggggtttctcctaattgaggctggtctcgaactcctgacctcaggtgatctgcccgccttggcctcccaaagtgttggaattacagattcaggcactgtgcttggtactacgttttttagaaactggatgccaacagaaaaattagagcccacatgaaagtctagttttcttctggtgtggcggcccatgcttctagtcctagcaacttgggaggctgaggcgggaggatcactttgagcccaggagtctaaagctgtagtgagctatgattgcaccacttcactctaggcaacacagtgggatcccatctctaaaaacaaaaaaaattaaaattaaaccaaacatttaaaaaagtatagattcccaacttctctacactggcagcatggggcccagcattcacctaggtctgggtagcagctgcacccttggcctccgggtgtgtgatttccaggccaccataggctctgatggcccattcagttctgtgatcccagcctaactctttaaagcatttgagtttgtcactcctgatcgcatgcagcctcttactttaaggaagacgacccgagtcagccaggtaagggatttgcctgaaatcatctattttgtccacagagcatggtcctggccccggtgcaggcctcctgcctctgtatgttgtggcctctctttgtgggtgactagcccctgccatcagaagcccattaagctctgtgaaattcagaagcttggtccaatgggtcttggttgtggctctcagggggcctggggataggttaggaatgtatgtaacactgttttataaaattatcacaaaccaagttccccttggtgacttgttctgaattttctatccatgaatgtttttatatctttctgctccaaaattttacctgctgtaaaactatataagaacattaaaagacatttacaaaagcagtcataatcccaccaccatagcacagcagctgttcctatctttgatttttagaaatgctttcaatcacagaaaaggctattatttttatccggtgccactgacagtatattttaaccgaacttcctgcctcccatcctcccactctccccttcctttttctccctgtcttgtgcttttctttaccctccatcctttcccacctattgtccaccaggtactacaatccttccatcttacatccagagtttctggagggtacagccacacaatgctgctccgtggcagccctggcccaccctaggtaatggagttctgtgctctgtctggtggtcaagataaattccagatcctgggaggcagagtggggaacaccaggcatcagcaataagctagacttatggctccaggctctcttttccctccactaaagtggaacattttggctgaaggagtgtgtgtgtgtgtgtgtgtgtgtgtgtgtgtgtgtgtgtaaagaaagaagactggaatagtaggactttaggcaccaagaatcccctcccttgctagcctggcatattcagataattttcttttgatacctctgacctgtaataaattttaagctccatatggtcatctttactgtgtatggcattcttagcatttatgtatattcatgtcaataaatagttattgcactgtgtgccagaggggtatgttttagtagatggtgataacaaaatgcaaatggcacttccttaggaagttccatgtcatgtgctgctggaaacagcccctgcttctagtgctgtagtacctgtgtgaccttggccaaattacttcacttctctgtgctgtttccttttctgtataatggagattcttaaccctgctgggaggattagttaaatgagatactgtaagtgaagcatgtagcacaaagcttggcgaaccaatggtgcagagattccagttccctccccttcctttctctgcaagttttctttagtgcttgcactcctgccaaatggttagtaatctgttaacaaacacttaagtctttaggggtgctcagacgacaaagggttgcttttggagagtgaagaatcttcttgtaatataaatagtcaactccaattccagttttaaagtttggtacgccttgaattcaacctgttaagttagcccagctctatctggggttctggaaaaatctatccaagcctgatgttgcttgagagcagggcctgggtatgtggcctgtgaaggccagctttgctgtgattttcaccaatttccttacaaacggattttggaccagacttgtgcaagcttcccccagcaggtcttaggaacatctggggatccaattcagccttttctgacgttctctacgtgcagggcctccaccaagtcattgccttcatttcttaagggccatttggctgaacttcacaaagtggtggaaacacatattgcacacacaggtagtctaagatcgggaataaaaagattacaagtcctcccctttcataggcatctgggtcccatggttcatccaaaatgaagacctctgagctctgtcactgccaggtggatgggttgggtacattccctcctctctctctgcttttctgtcctcatttgtaacccgaagaccataggatataatgaatctgggagggccagaaactttggaaatctaattcagtcaacagacctgtgttgtttaggtgctgtctttcttccatgcgcttgatttctttgacattaaataatctgcttatggtgttataggacctggatgttgaaagaaatgttaaagctcatttcagctttatggtttccccacaccacaggtggtgtagcagataccttctagtgatatatggacaggaccctgagtcaccaaggagggatttagttcatttccagttttcttccagtctttctagttatctcagggagaaagtctcggtttactgtttgaacatctcttaacccttgcctgtctcccttttgaacaaaggcacagaacagcccccattgagactgcatgcaaacggaggcatctacctagaatttcataccctggttttgttttgcatttattttgaaagttttcttctattttgtttattttgaaggttatcttctatttcttcactggtgataccagtttttcacatgtggtaatgttacggagtatccttaagatatatttatttaagctgggtgcagtggctcattgctgtaatctcagcactttgggaggctgaggcgggaagatcgcttgagcctaggagtttgaggccagcctaggcaacagagggagacaccatctctacaaaaaattaaaaaaaaaatagccaggtgtggtagcacatgcctgtagtcccagcttttcaggaggctgaagtgggaggttgagcctgcagtgagttatgatcacaccactgccctccatcctaggaggcagagtgagactctctccccaaaaaagatatctttgtttagttaaaaaatttgactccattgaaagaaaaatgtttagtgaatagcataggagtcatgcagctagggcagaagttgtgatgggagtatgtgaataacacatttaagaagcactgatccagtccttcttctagattagtccaaaacccgctgaccttgactccatttctgaccccaccagtgacaaataacaagggggaatctcccactagccaaaaaactccttggaggcaggggtggtgtctttatcgtccttgtatttccagtgctcgacaccggcacttggacgtattcatctatttcacccgtattgatggagcacctgttcctcagcagctgtgttctgggttcgggggtcctgtcgtgagagatgccatgtgcagcattgaatatcttcatacaaaagaatgtatgtcaatccataatggtccaagacatgcatcacgctaataggggagcctctcgcttaggagagggttgagctggtgcaggctggccttgagatgtgtgtcgggagactggttctctcagggatggtgttcttcctgaacacgatcttccctgttctgaccgccagcagctccagcccacactgtccagaacaagatacctcctttccacaggaacgagacacacttccacagcagcaggaagaatgcctgttctggtgcagtctgattttcaagcagtttgttcttctacagagaaaatagcctagaaggtgagaggcaggcctggctgcagatgtctagatgtgccaaggccccttgccagtggtcagcaggctgtagcgctggcctgagcttgtagttagtggggactgtggttggggaagccgaaggaagcttgaagctaggtggtgacgttgaagataaatgtcccgtgtgttgagtgaggaagggacaactctgaggttggggcgtgttggtgacataaaaagtttaactgagcttcctaaatgggaggcattctgtatttggctgtggcttgatggaattgcagttacccttgtggcgtgggaatcagcctcgggaccattaggatattatgatacagtcccttggtgccactgattggcggtgtcaaactcatctgtcaaaaaatgaaatcgatcagccaggaaggatgctggtgttgaggctgacataccttttgagcataataactactgtggcttccggtgctttgacaaaacctcagatacatggccttctggctgagcatctgtgatttcatattgttggcgcatttgttatttccctgggggttgcaaccctctgtaactttgctgtggctgaactaaaaaagaaggcatacacggattctacagaaattatgattctatgaaagattttgaggagatgaggtatctttcagagtgcaaagtgattttggaatataaagtattcctttgggaagaattacctagagatttgtcactgacctgtgttcttgaactataaaacatgaatatgtggcttaagaaatagtttttcttaaggctgggcacagtggctcatgcctgtaatcccagaattttgggaggccaaggtgggcagatcacttgaggccagaagttcaagaccagcctgaccaacatggtgaaaccctgtctctactaaaaatacaaaaattagccagatgtggtggtgtgcacctgtagtcccagctactcgggaggctgaggcgtgagaattgcttgaacccgggaggtggatgttgcagtgagcggagatcatagcattgcactccagcctgggtaacagagtgagactctgtctcaaaataaaaataaaaataaatagtttctcttgacaaataaacaacaaatttttaaaaatgaaatcacctttgttttgaaaaattgaaacttacctcatgaccattgcctgattcctgagtcctgctcctctctgaatatgaagttgcggagtctttttaaattcatgaacagatatccgtgatcttttctcaccttcagggaggttcaaggctccctaatctctactccatcccaatcatgaacacttccaccctcactcagtcccttccccctcaccattcatgaccctctccttcttccctccctgccccttccccctctgtaagtctctctcgcccaggtgtaggataagaaagtgttttgcaacctgtttggtagttttttaaaagttgaaagtttaatgatttgttgttgttttttttgagtgggaccagagtgtcccagccttaaatggctcttttgaaatgacagtatggaagaaacacaacattgaaaatggggacctttgagatctctgctgtctgggcctggctctgccaccacttccttgtgtgagggtgtatctggcctttccctttcatgggcctctgtttctcattgaccatagaagggatttaggtccctcatttgagtgagtctcttcatttctgcatgccagttggcttgttgctgtgacagtgactccaaagctcatcttcaggcttctgcttctgaagttcatgagtctgacactggatggctgtacttgggttccacagttgtgaaatggggaaataagagaagcaggatgactgcttgtttttgatggattttacgaagagcataacagagtaagagtaacaggtgagcagggccttcccagcctcacgcagtgcctagaatagtgctcataagtgactgattaagtgaaggaacataaggtgattctatgagttttgtgcaaagcaatcaaaaagcctcaaggaggcaaagtccctttggcctctcattaagcactactttatcccagtaacccgaaggtgctcagaaggggaaaggaaaggagagaggtagagtgcagctgtggctctgggagcctggagtcctgcaggtgtgagaggcttgctgtatgcttctcctgccccgaagctgagcatcccaacctccacaccctttgctgtgagcctttttttttttcagagatagagtcttgctctgtcgccaggctggagtgcagtggcacgatcttggctcactgcaacctctgcctcccgggtccaagtgattcccgtgcctcaacctcccgagtagctgggactacaggtgtgcaccaccacacccggctaattttttatattttagagatggggtttcaccatgttggccaggatagtctcaatctcctaacctcgtgatccatccgcatcggcttcccaaagttttgggattacaggcgtgagccaccgctcccggccttttttttttttttttttttttttttttttttttacaacagaccagacttcaggggcatgctgcaaatatctagcagttgctgctgcatttgtgttgcagctgccctagggctgagcccttagtctcaactcagtggtctgcaagctgcctgtgtattctttggactggctggagccaaggtaaaccaagagggggccccaggtctgccctctggctgagactcttggctgttcctgcatccatacactctgcttagaatgtcataaaaggattagagaaatccctaggacactgttctgttcccagggctgaaagaggattcctggaataccagaggcctcaaggtatgattacatttcaatccccatgcaaaattgtagaatgtcataccatccagtttctctgtcaatattagttctattgtttgcaatctgagaatgggagccaatctatggcctctccagtgcctgcttttggcaagagagaccatcaagagactgaatgaccagtcactgcatgttttctacctagaatgataggaaactggtcccttgatgtactgtcttcaggagggacattgggctggctgatctgagctggaaattgatcttttatctttctgaactggcgcaagtgaagagatgacagtagatgtgtcagggaagcggggagctgccatcctaaaaggagtagttccctgcagcctggagaggccagggtagaatatttcccaagaaaatcatgaagaggacagagaggattggggaggctttattgtgttggtgacgatctgtgaattataatcaaggcatgttgatggacaagtccttagcatgtgttgcctaacagtttattccttccacctaacttaatggaggcccactctgtgctcgccacaatacaaagatgtattgcattgatacaaagacgaatcagctttagtgattctcatgggagttgtacttatagtagattagcaggtgcatggacatgatgtaagtggatggcgcctccttgcaccctcccttgttatgaccactgtgaggtccttctcaactatgtctgcaaaaagtgcctgctttgtctgttctcctggggaacagaaatgctgatgtttcactaggcgttgttcctaggtgagtattctggatggtggtggtggagcctataaaccaaaacatgtctgaaagagttctcaatcaatttagaggttcattttgccaaggttgaggatgagcccaggaaaaagagataaaggctacagtagactctgtggcctgtgctttttccaaagagggttttgagaacttcagtatttaaaggcaggagagtgggaaggagcaaaaagagggacactcaatagtgcattcggctcctgctcagtaaatcttgtattttacataagataaagtaaacatagagtagaggaagaagaagtcagatctgcatttgtcttgaggtgggcagagggatgatttctagtcttgtctttgtcccttacctgtgaagatacattgtcagggtgagagaggctacctggggagataggtgaccttctctcttgcagcaatctgtttaggaacaaagagaaagcagcttttgcatgacaaagttcactctttcttttggcatagtgagttgagggtcccaagattttactttcctttcacaaaccaaattgtgacatggctgtgagaggatggtttcttgtatcttgtatcttcttgaggattaatctaaatcatttgtgtaagagaaggaggtagactgggaatcaggacttcagcttctatgcatggctctgacactcatctcttagtaggattttgaaccctgacttgcttattgcttcagttcctcttgttcaatggaaaggttgggttgcctgatatatcatatatatacatatatgatagatacatattaacatatatataaatcacaatattctttggaacaggaactctgaaagatgcaaatataggaataaaggggttttgtttgagaaagcttgcaagatgttaggtcaaacaaaacaattaaatagtgttcttcttattgcagaactttttagggcctttaatagactactatggggaatttccaaaagagggtacaatatgcagtgattctcaaacttagttgaccatagaatacttgtgttggggagaagcttatgaaattaatattccttggaattctactttgggaattgtaagggtagaccagcgatgttcaaatggtggcgattttgccctcgaggggacgtttggccatgttgggagacattttagttgtcacaattaaggatgggggtggaatggaggagaatagctactggatagatgccagggatgctgccaaacctcctgcaatatacaggacagcctcccacaacaaaaagtttatccatctagccaaagtgacaattgtgctgaggttgagaaaccctgaacttaaaacccccttctgttcctggctctaacacttgggggattaggtggtttggtgacccttccgaacttggcataccagttcaccctcaggcatctttggctcttgaactgtatattattctctagaaggcaggagaggtgaggcctttcatactcatccctgcagacctgcacatttctggcaccagacccatatatctatatatctatatattcatttaccacagcccagcattcctggcagcctgagagctggtggctagttgagaagaacatttagtctccctttcctgggtcttgtttccacccctagtggccaagctggggcagctcgctttgctctgtggtctgacaaacttggatttcaaaacccactgcctgccaggagcagttcccgcagacagagctcagattccaagaagactatctggctcttagagatccatcatctttatgaagttttaaaatcacagatggtttttatggatattcaaggtattccagcctttcatgttttctcttcatccctctttcttccccaatcacacatttttctccagtaaccaaaacacaataggtaatggaaattccattacaggctgacccacagagactgcatgggaccaatgcaattatgtctggagcaaagcactgtcatgactaattagcctctcacataaatgaattttcctatggataacttcagaaaaatcagcctgcaaaacacactccttattagttttccttccttctctgggcttcggagttaggctttccctaaggattctctccaccactgggccacgtgaacagtctagcccatggtggaaatccattttctgcttgctcttcaccccctcagtcctgtgcttagtttcattagagactaagtctcatcagagacctcgttatttttagggtgatgagctatttattgagcaacttgcttctctcttggaaggcaacataggcagtgatgagcaggggctctgtcaccccagctctgcactgacagtaactttgggggaaccttggagaagccacattgggacctcctggttttgtcttcccacctgtagagaggggcattgtccttgatctagagatatcagctgtgattgaatgagtgtaattcacggagcagactttattggccactgaatttagaagggattataaaacacatcttccttcaaaaggatgcttagagctgggcatggtggctcacacctgtaatcccagcactttgggaggccgaggcaggtggattacaaggtcaggagatcaagaccatcctggccaacatggtgaaaccctgtctctactaaaaatacaaaaattagccaggcgtggtggcatgcacctgtagtcccagctactcgggaagctgaggcaggagaattgcttgaacgtgggaggtggaggttgcagcagtgagccgagatcatgccactgcactccagcctgggtgacagagcgagactccatctcaataaataaataaataaataaataaataaataaataaataaataaatgaatggatggatgctcaggattggatgacttattgggcaaaagcctgggcccttgcttaattggttcagacatttgttgagtgttacctatgtgctaggaagtactgctatttcttctgaaggttgtagaatctctaaatatagagacaaaaagagaggggagggaaggcccttgtgaggtgttagcaaagacctcccaccaccactgactggcactgattcagtatctgtatctgggtgctgtgccaagtcatctccacatctcagctaacaccctctgtggtgcatattgatagtgcccccttccaggggagggcactgaagctcacagaggttaagaacccgtccaataacatctgagttagtaactagcagaggtgagatttgagctcagttctatcatactctaaagcaagcctcttcactctgtgtctgctgtgagcattgttttgaatgggtccttgattcccagcctgtattgactttccactgcctgggtgctccagccaggctcagggctctggggaatatataagtgaccatctgggctgggacagcaccatgatgctgatgtgcaccaggaagggctgcctttgggaagaattgctgtgcactgcactcagaaattgcatgtgctagatgttggagctgaactcccctaagaggaattttctaagtggattatgaaatcaatttagtgagttgtaatcaatgttaaaaaatacaggatatcaaagtacattccatgtaatagtgtaggtattgtttcatgaatcctgtgttgcaattacttgtatagtaggtatgtgtgggtcacgatgtaaaatgtatttcttactttgggtccaggtcacaagttggaaagcgtggccctggaaggaggtggggcatgcagcagtgctgcagagggaggtgtgcaggctttgccctttaaggctctgctggggatgccttgaagaaggcagagggcacagcaagtcctggcaagtgggtcagcaaactcactctgactggctctatgaagtgctgcaggggcttcagagatgttataggggaggcccctaccatttgtcaagaaagtgggagagagactagctctgctccgcaagacaagagactataatagtcaacatctacaagaataataacagcagcacactgtatccatctttaactaacacgaactctagcgcagactgtctggatttatatcccagctcaacctcttataactgtgtgacctcgagtcgttcacctaacccctcatgcctattttcctcatccgtaaaatgggcataataatagtacatactacataaacttgttgtgaggattcaatgagttactatttagggagtgctcagaaccatacccagtagacagtcatcatatatacatgtctgttatatacaaaaaaaagtcatataagctttatatgagtgcccaatagaaagctttaccaaggcaagacttgaagcaggccttgaagattactccattggatcttcttcttttcatctctgtcatcaataactgtttatttcaggggccataaatatgttccagacactgcagagtccttcacgtatgtcctacagtctggtgaagtgggactcatatgctcattttacagatgaggaatgaatatttaaagagagtccaagccaggccccgattattctggctgtgtagtctgtactcttgaatcagacgacacagtccctctttggcctgccatctgtgttgtactggggtctggagatggttggtgtcctgttctgccccttgcttagcttatcctctctcagcctcagaaaccaaggccctgtgtggacagaaagcaccgcgatgaacacaggtgcctatttgaagtgctctgttgtcccagactggaggccagcagactcctaagcaggatgtgtcacctagcagagacccatgcatttttaaatgtcctcctgcctttggagacaggtcctgaaaaaataccagaatcattaggactcttagtcatccagttcagccttggggagctgagtatcacagccctgttgtcagcagcagaagtcctgccacctggacaaggctgggaaggcagcccacattgccgcaccagggagaccccaagaccaatgcctctggggtcgatgtgggatgattggtggttgactgatggcaataaatgaggacaaggagaaggcagggcccctcagctgcatgccatgggcaggtttcaacagagtgtgggctacatgtccagatctcacccaagcactgtggacaaacatgaaggagaaggcagggctgctgcccacatggggagtctcatctatttggggagataccagtgctcagaagcctaaattcaagtgctgcaggaatccagggagggggcatttagggaaactggggtggttgtgtaaaacttcccccaaaagagaaaattcaggtgagggtaaccaagatttggagtgactacaatgttaaataaatcggggcaatgtgtttatagataatgtgctctccttctgcaagctgccaccagcctgccaatacttatatcctcatccatccatccatccatccatccatccatccatccatccatccactcatccatccatccatccatccactcatccatccacccatccatccacccatccatccattcatttattcagcacatacctcccaggtgcctgccctggcccaggcccagtgctaggccctgtgtagacaacgagcacagttgcatgctgcctctccttcctgctcatggtctagtgtgggagaccagcattgaacaaataaatcagcaaatagctgtgaaattaaaatcacagtgagtccaacaaaggaaatgaatgggttgtgatgagaaagaacaagggggccctaatttggactgaaccaggctgagtgcatctgtcaaaatcatgcctatcctttgaggctcagcagaaataccaccaccttcattaaatcagtctgttcctgccatttaacaggtcctctgccatactctcttcctccctggtgtcatattctaccttgatttagttttgggtacttgtctgtttcccctgagagatcttcaactcctggaaggagagattgtatttttttttttgtctgagaacctgttgtgagtaatcctctctcagagatgcccaggtgaattgttgaatgaatgaatgaatgaatgaatgaacacagatcttcattcctagccccaggcttccactatgggtatatagcagtccctgtggtgagagcaccagctccagaatcagctgcttactgactttgtgactgtgggcaggtgccttgacctctctgagccttcatttgccatatgggggcagtgctataaatagttgtaaggatggaaaagattagggcatgtgcattacttagattcatacttggcatataatgctttataagttagaaggaatgtgctagacacatccaacaactctcagaatcctcacaaatctgctgcaaagcacttataattattcctgtattatagctcagaaacctgaggtttcaaaggattaactaacctgctgtagtttgcagaataaattagattttaacacaaagcaaaacaaaccaacaaaacaaggccaatatgcaaacctgggattgtctgactccaaaagcttgtcttccttgacagtgtcccattcctctgccaagctgaattctcacctctgcagacagaggctgagatgtttgcattttggaagctcaccgcctggccaaaggctaacatattgttcatggatggactggacatttgaaattacatgctggccttgggagggaagagagaaggaatgcttgacttccacggggtgcctctgccttacccatctcaaagaatcagacccctctctcatttttcaagggccttggggtgagcatcctaaaagtctcacagtctgttgcagcagaaagcgtggctttgtcccccctataaaacatctggagattttcaagtttgtgcagaccccatgtgagcagccagccctgggttggcatggattggagaggcagagaaggcattcacttggctctgatttttcatcctgtggcctcagagcttcagaatacagagtccctacccctggtgtctccttcctctccatccaccatgacaagctgtgtccacattctctttttggctctttcctaaggtatcgggcacaggactatgtctgcccaagaataaaaattataccccttatatttccaaaaggagaggcatataatttatgactaaaactggggtactctgactgaaaatatctactgcttagccgtttctatgtcgattagagaaggtgtttatagctcagaactagaggagaagaaaccatttctttgtcactgagaaactccttgccagggtctctcagtgagaaacaggacatgtggagcccaagatagggcaaagccaagtctccttatcttatttagtgacatttttttaagagtaaaaaataatcacatgctttttgccaaatccagccctaaggcatggatccaacaaaacatcacattaattagataatctaatttccaaaaacagaccccagcgcagacacccactgtctagcagtgatgacaaagggaacagacagctgacatcgtggcttcctccttcagagttcatgtggacacctaccaagaataaggccttggccagagctttatctgtccttggactagaatgtttcttagtgatgccataacaacggggttgacttaaaacaatgttaatttattgtctcacagttcagaaggctggaaggcttaaatcaagatgtcagcagggccagcctccctctgaagcctgtagggtttctccttccttgcatcttccgtgtttctgctggtggctggcagtctttgacttgcagccaccactccagtctctgcttctttggtcatggggcgttctccctatgtgtgtctctttcctcctctcctagggacaccagtcatattggattaggagctcaccctactccagtatgacctcattttaacttgattacatctgcaaagaccttctttccaaataaggcttaccttcacaggaactggggattactattgaaacaaatcttttggaaaaaaacactgcaacccattacaggtgcctaagactagaaagatgggtcagagctgctactgccagtgtgagaaagtggacaagttggagttcacctgggaataagatccttggatggaggagcaaactccagctagaggaccgaagccttgaaatcatttattctgcagatcagtgtttctcaaaacggggttcccctagccatcagcattagcgtcagctgagaaacatgtaaggcatgtaaattcttatgctccaacctaagcctactgaattggaaactctgggctggggtagtttcttattttaataagccttcctggtgactctgatgcacactaaagtttgagacccattcctctaaattctgccgtctctcctcactgcatcacttttcagtggggctgcccttggacactggcagatattttgggttaaagaagaaagttatttggtcaaaatgagtgtgggcagcattgtattggtctatgttgaacaggttccttgactgaaggctatctctgagcttttgctatgctgtatgcagtgagcattgaacatttgttagaagaggaatgatggcatttccagatttcactgcaaagagaagtgtcccttttgtatggagtttcccatcagactggtgttccgtgaatttacactgggaaacatggctctagtccacatatcaaggcattcagtgaatttttatgaaccgccttgtgagaacaagacactgtgctggagagatacatctgtgaacaagacgtggcttccgtctctaggaaactgatagtctagtgcaggagctggcacaccacaggctgtgggccaagtctggcctgccatctgtttttgtatggcccattagctaagaatggttttcacatttttaaatagttgaacaaaaattttaaatgaagaatatttcatgaaacatgaaatggtatgaaattctgatttcaatgtctctaaataaaattccgctggaatacaaccacactcctttgtttatatattgtctaaggccacttttgccccccagcaacagagctgaatagttgcaacagagaccatatgctaaagcctaaaatatttcctatctggccctttacagaaacaatttgcccacctctagtctagtgaagcaaagaggccctgaacaagtacttgcaaatgccttgagtgttatgaaggagcagtgcaaagaccacatgattggaaggttttattgactgatagcaatggtggtggtggagtggaggtggagggtgagttaggaaaggcttcctggggagagatcttaaatatgagtaggacatctggaatatgactgtgtgaagaaggttgttacaggaaaaggaaacctaggacatgcagatccctgaattagaaaagaggagtgctcattgaaggaatgcaagaatgtccagtattgctgtggattaagggaggtgaggccaagagtatttcagtatgtggccagatgcctggcaaaggccagatgtgccagagcatcttcgacggccatgctgagggccttaacttttgcctaagagcaagggggagtccctgagaagagtttaagcacaggcatgatgtgactgatagaaaccttgtggtatctctctggcttcagtgtggagaatgaggggcagaactaagtgggaattgtaccattgcatgatacaatgtaaatgattatgaagcttaggagtcaaccaggggagagaagctgagatggagagaagtgggtagatttgaaaggtgaaggttctctgtgatgcttggcctccctcctgccaggccctttgtgttctctgacaacctaaagaaccttccttcctggttactgggtctgtgctcttggaccctgatatattaataaatattgattgtttgttgcacacctgctacaaatccaccaggcccagtgctagatgctatgaaatataagaattaataagccctggctcctgacctcaggttcttagccgggagactgatggatgtagccactggactagaatgtaatgaggactgataagcagagaaacaagtgatatctgaggggactgatacctgaaaggaagtattgagcaaacagccctggagacgttagctctactgaagaggtctggagaggcttcatggcagaggcagcgtttaggctttctcttaaacaatgtgtaggatttgggaaggagaacagtggtcattaatccaacatgagcacaatgacaggtctattaacagcctccggtgggtgcaggggaggctaggggagccatgtggctggcatgagccatcagtggaggcttacagagagcaaagaggtgctcctgttttggaaactcaatctagactcctgattgcttcatgtgcctgacagttcagtgaaggctgtgctgggaccatgagttaccctcagcagtggatcagcagggcagcagaagacccactctttcactgatggccagggccctgcgtaccccaattcacttcaggcccttccaaggcaggtacaaatcatgaatcacattcccctctctatgactttgtttataggcagagctctaaagctgggataacagcaaactgcatcaacaagttctctggggcctctagcccattgatcctatgacttgttgtgattgcccctgacctcttcactttcttcttcagtttggtgctttggccactgggaccaatgacttccactgaagttttctggttctcagtcctgctttccagggctgtgacacagggtgatttgcagactgatttctgtcctgtgccagaagatacttaataaatgctggcaatgacgatgggtccctgaagagcagtttgcccaatttattttttaaagactttaaaaaaatagtatagacagaaaagtctataaaatgaaaaattacaaaatagcaaattattatagaaaatttgtgtcactaccactgagttcaaaaaataaaatactgtcggtatccccagaagcttccctgaccatcccttctccttggctggcgtctcacctttgacgtctcaagttcaagaaatctgagtaacaactctttctgcctagcttctagtaagaaaaacagctgcaaaaggagaaaaacaaaacaaaacaaaacaaagagacttgggattcaggtaaccacctgacctttcttccggatctgctcctccaaaaaaggtctccatccctgtcagtgctaagggctggatggttagttgttatggagacgtggggcgtctttccaagacgccagcaaagttgatgcctgcagcgctctggcaggtccctctgctctgcagggctcttctctccttgcagttggcagatccttataataagagacttctgagatgtaaaaggaactctcccctcatgtgaccttcatgccagtccccctggtgccaccccacctcagtgcagtagctgagcagtaacagagggacagccagtttccctctgtccaggggagattgtgggtcttcaggtgagagtgtggcggcactaacaacagcctagtcacaattcattagtaaacttggcattcaggttactgacatttttgcaaactgcactttctaacaattaccctctggttaaaatctgtatttgtagaaggaggccagtctgaaaaggaatgaggggaagaacgacttcccctggagaagtctgaatgaggtggccctctcttctaaaagaaaggtgtgtgccttttgagatttcaattattgagccacttccatcgggagctcttcaattatttatactgggtgtgttgcaagtagattcaccaatttagaaagttgggggaaagaggggacatggtaggagggaggcccccgtggatgcaagtgtgtgggcaagtccttttggcttcctcttggctctttttctggatccaacttcatcgtagggctggaccagccactttgtcaagggtatcctcctcactgaggtctggagatggggacagggtgtggatgcccctgggtgtagggaaccgacacttccagacactcggtgagctctgtctgggtggaaaacctcatcagaagccagattgaatcacaccagtttctaagacattcctcaaccatgttaggcaaaagagtcccccactgacaagctggggtagaaggaaacctgatataattttggaaaaaaaccttacttgagaaagaaggttctcacagctgccgagtctctctcgacgtccagggttggaggggtcccaggccatggagagaagattgatgggtctagcggagccaagtagagagttgaggctttgcagggccaggcgcttgccatccttaactcccattagggatcgagaaggaaaaggagaaggagttctctgaatccaatggaaaaagaagtcctgtctcctttccctgggctgttgaattgtttttatttcacattagcaactgctctggactctcttgtgtttggctgctgtgttggagacctagatccaaactagggtgtgtgggaacccagggacatagaggctgaagttttggaacccagccagttcttccaaggggtgaggtcagaggcagagtccagggagcagggcagctctgggagcctggttcctcaggctgggctgtgctcggagcggtagatcctgactgccgctgtatgcctggtaacctggccatctttctgcctcccaaagtctgtctgtcttgctagcccttggtttcctgaatggggatcatcttaagtgtggggaaaggctgtctgacgacctaattgggacagctcttttgacccgaagccaagccccatccaagttcagcaaatggaagaagcgggaacatgttcagttggtgaggtctataggcacagactggattaggtcctaaatcatggtggaaattttcctggcacgggacaaatccttttgtaaacaagaacattcatctttcttttgactgacatgcctggtagggcatgtgcctctcagaagctccatgtcatctgatctcatttgggatttagtgtttttatttgaaaatgtagctgccctgaggaacagcagttaggagccaacccccagtttaagcttcaagtcatggaaactggcctggtttacccagacgtcagtgatgcctgggaaagctcttgcttttccagtgcccactgagcagagatttaatttactcaatcggtacgtgtctgttaagcacattgctgtatgccaaacactttgggcataaaaggtatataggccttgccttcaaggattgtccaggctaactggggcaatgcaacatgcatggaccaaaagacagctaagtacctgtcccatgtggaattgggggagcagatgtgggccctggagacaggacagggagagctttggggagatctagccaggaaggagaacttcactgcacctctgggatttgatcagggaggatgaagatggttggggagcaatggggagagcatcccaggagtgggaacagccagcacggaggtgtggcagtcaggaggaccaagtcatagccgagaagtcaggtggaagagcaggtcagtgacgagtggggagggcagccggcagcctcagctccaggccttgaagatcaggccttgaggagtttgacttctatgcttagggcattgtggacttggcaggatttttgagattccagaagatatgagcgaagagtgaaaacaaagcaggacagaacaaaaaacagaatttcttcatttattatttcagtgcactgtgaaatgctcaccgtgtgctaggtgctgttcaggctttgaggatgtggagtgggcaaatcaggcagactctgccctgactgctagagaataagcacacgtgtgtgatgaaggtggtagtggtgggaagcaaagaacagcagcgaaggggatgaccgtgttcccttccgtgtggggcactgggctgtgacttacattgctctcgggttactcatctttttactccaaattgcttggagtcctctgttgactctgaagggaatattcaaccataaacaattcatcctatctgctatctgtggttgaattctttcttcccagttgccccttgggtggtggcttggggccacggtaacacttgtagtatttcccgggaggttgttatagttctgtgcatttcctgcagtagtggtagtgaaggcattagatgccaggaactcaggcggttggtatggccctgagctctgaaaatgcttgccttcccctttcccctattgtgtgggccagcagcttgcagagctcctccagccctgagagaccatgcctccatccctcagaccctacctttcctggccccaaggctgcctctggctagtgtgacagacacaccctgggcccctgaagtctgaaagccacatttttcgaggggaacctggccactatgagtgtggaatattggggccttaaatttcctgcctgtagaatgaggcatttgggctaggggagtggttcctagactttttgtgggataatcaatgaatttttataaaacagaatatcacaaggccaccagctttttattttgacaagcaaaaacataaaaaaagaaactgtcaaatgccagctctgccaccattgtcatttcattaaaaggacatgttaatacccaacaaaggagtaacgatataatgtcaaagaaaaggacagttcttcctgggagaggcccttcatcagttgtcttccactgacacacacagtgcgctgtactgaggcttttcattccgtaccacatcaggggcagcactgccctgtggccatgcaggacccatgggaacagagcacctgtgagctacctgcaggagcctttgctgaggagagtgaggctccttgggggctggatcctcctcctggtctacaggatggcaatgggctccctccggtaaaagttaacttggcacgaagatttctgcattcttttatgaacatgagggtttgggatttcctgtgtgtttggttatccatatcccagtctgccctgatgagaaacaaatgtaatttttgccttcctgctgggcccctgccacagttttcttgtctgggcaggtcttgagctgagcttctggggcaggatgggctgccctgcagactggcagctgagtctccgagtctctgatggacagcaggctgtcttggaccctgccagggtcatcctggctgaggactctactaatccaattcaaagtctctatggctctgatagtggactctggactgtcacttatattttccaattttattaagctaattgaaagagaaggagattgttattttacaaatacggcacattggccaggatgtatgtattagccctgaaagtttggaggttgccttactaattttaggcagcatatgtggccatttgagaacatatctaatgtctaatgagcattgtattcccaggttggatccccgtcccctagcccatttctccaactctctgtccgtacatagtggattataactgaatttagatgtctgtactacaggattttgttacttagaagccataggttgtgagatggttgtttcagtagtagtagtaaacagaattttatatggagattccatctctgttcttgcacattggacctatcccaagacagtgtggaatagagagaaaaaatatggccttcagagttagaatggactagattgaaatttcagctctgccacttacaagatgggtaatcttggaaaattacccaatctctctgagcctcatgacattcctaccttgcagccaggcgtggtggctcacgcctgtaatcccagcactttgggaggctgaggcgggcagatcacttgaggtcaggagttccagaccagcctatccaacatgttgaaaccccatcttactaggaaaaaaaaaattactggagcatggtggtgggtgcctgtaatcccagctacctgggaggctgaggaggagaatcgtttgaacctgggaggcggaggctgcagtgagctgagattgcatcactgcactccatcctgggcgacagagtgagactctgtctcaaaagaaaaagaaaaaagaaaaaaagaaaaaacattcctatcttgcaggcttcttgtgaagattaagttggtgtaaaatcaccaaggacagaacacagtagatgtaagaggggatcagtgatctcctgagcaccagttgacccccttggtcctcagggaatgggagagcagctttgaacctggctctgagaagagctgaaaaggaatctgtcctgcagcatttcccgggggagggaaatgatgcttgattgacttgcccagggttacagagctgagacagtgcgtgcaaagtaagggacttaacaatccaggcctccgggtcagacagtttagagctggacagaccttggggagtgtttacatggctccctgcatttgagacaaagaaacctgaggcacaagatggtaaggacttgttaaaggtcacctggcctttttctaccatgaagacttccaaagagtagttgttcacacccagcgcaggggtgcttctaagagtgagaatctggacagggcacccagaaagcaatggctaaaaatgcctcaatggtggagcactgtaggtccagccgagacacccagtaaactcacagggctttctgacagctcggggtaatcggttaggtcccagcttctttataagttcctgttgcctgaatctgtggacagtgtgtcccttccctaaaggtacagcccacagttagcaaacacagtaactgctaggtgaattaatcagtgcaaatgtcttaagccctgctggtgcagagtctccggggtgcagagcaggagaagtgatggcagccagggagaggttggactatgcaacttcccaggggcagaagtgaactctgccactcctgacaccagctctaggaaagacctgggtcccctgttgccctatttctctggtccttgagtctcagagtaaccacctcctccatccattccctttgcagaactcttgccatgaaaaccccagctggtggtgcccatgctatgcttgatttgcttgagctgctttgggtaatctgcctaataccctaatatgcaggattattggtacctgggagaatgcccgtggctgggaaacccgcccaggaggtgaaagaggttgctgggtggatgtcctctttggcatgggaggggggacacggaagacccagccccagcattcggggctggtgaaaacctgaggcgaaggagaggagagcagcccgcggggagggaccagcagccccagggcttcctaaggtattgaggttcagacacttctggatcttaggccaaactgtgccacaggatgtcatagttattgtcatgaaacaaagcattttttaaaaagctaacatggggccgggcgaggtggctcactcctgtaaatcctagcactttgggaggctgaggcaggtggatcacttgaggtcagaagtttgagaccagcctggccaacatggtgaaaccctgtctgtactaaaaatacaaaaattagccgggtatgatgacacacgcctgtaatcccagctactagggaggctgaggcacaagaatcacttgaacctgggaggcagaaattgcagtgagctgagatcacgccactgtactccagcctgggcaacagagtgagactctttctcaaaaaacaaaacaaaacaaaacaaaacaaaaaaaagctaacatgggcctatggacttttactcaggggatttctaatgtttttccccagaaaatcccttcactcagatgcagtctagcacagaaccataataggtgaaattgctcaatgcagaggcgcttttatttccgcggggtccggggccctgcctcctctgccctcccttggtaaccagcccccctggggcacctcacaatgctgggcctcaaggtacagaaaactgtggatttaactcaccaccccctctcgtctcccagatagggactcttctcagagaggttaggtgactggcccagggcacacagcctgtgcctggcttcatagcttctggtccagaaggcttccccctgcccccaccctttggtaggagagaaggagcccttctgcattgtgcccagttgaggacagcagcatgtggggctgctgggtcagtttcaacagacgagaggagatggggcaatggagtggccagggagagggtggggtggggctcctggcagatggaatgagtaactcagagcgcagtccatcaatgaaggctcaggggaaatggccttctgatgttgaccaggaaaatttgaggacaaaggggctgtgaggcatgaggcccttccttctctcacagccctctgggggtcaagcatcctgggactatcccatggttccagggtgctgggcagaacatccagcttccagggatgagaggggcttcccagcccctactctggtcccaaaagggctagcggagatggttttgtgctaacctgatctctcctgttccctgtcagaaccctacctcccactcaggtgcgtcaggcccggcagagctcagcctcttagtgctggagaccgctgggcagagcgtgctaaggactccaaggatacgcatggcgagggaggaagccaaatcttcctttagcagcatctgcatagagaaccgtggttcttagcaggagggcttcacagcccgtcagcttggccacgctcatttccaatgtgatactctgctccacgaagggtgaatttatggttccgggcaggttcttggcagagaaaggaactgtgtttctctgtccttgatggaactgccctccataggcacagggccctggaagaagggtcgtgatggtacaagcagtacccagaagtggcatgaattgagtgctcttcatgttaataaacctttcgtgggcactttgcagcagccaataatccttgcacatgcattctcccgtctgctgctcacactgttcccgggaggacagcaggatgggtacgtgtccctttttggcatcagacagctggatttaaattcacactgtgtcttcctgggccagctacttaacctctcatctgtcaatggaggacattagtaccaacgtcatagagttactatgatcatgctaaaaaacagtagtcgatagtataattattgttagtagtactatttactagtaatatctattctagattgtgcatggtaagaactgactttccatttgctgtagctctcctccctcctctcctccttcccccactccttccttccctcccacccaccaagatttgtcaggtgcttactctgagctcacagggattcaatattgaagatacagccataaatgaaacagacatggtgaaacccccatctctactaaaaatgcaaaaactaaacaggtgtggtggcacatgcctatactcctagcactcaggaggctgagacaggagaatcgcttgaacccaggaggcagaggttgcagtgagccgagatcacgccactgcactccagcctgggtgacagagaaagactctgtctaaaacaaaacaaacaaaacaaaaagaaacagacaaaaactctttccctcatgcagcttgcagacagcacacaatgatgaagtaaaggaagcaggtggcagacacactccggagaagacagcacagacagggagaggtcgggatgaggtggagagctcatggacaaagtgaggatgtgaaccaaagctcgagagaaatgagggtgcagccacggggatctctggagcagaggcagaggccagtgcagacagccccgagacgggactgggtctggaatgtcctggcagcatgaggaggccattgcatctgaagtggagctagtgagcggcagactcgcaggatgacaggcacgagtggggctgattgggtgtgaagacttcacttgtcctctgaatgggccaagaagccataggagggtgttgggtacaacagtgacatgatttcagttacatttttgaaaagtatttttcttcccagatggcctttgcctaaacaacttcccagatcctggatgaggaaccagtgtccaaagaactgacacgtagttaaacccgaggcagacttggagcttcaaggcttggctctaggcaggcagcagggaggggccctgggatcccctcaaggcgggcccagccagcttctcatgcctgaggcagtcatccagcaggtgtggtgcctgcagtgaccttggtgcctggttcagcttgacaggtgtcaggagtgtgcctgggggtgagagagtccaaccgggtgagagcaggtgtggcagcagctcaccctgtcagggagggtgtgcccagcatgacaggtcacctgctgagacttggcaatttgacatcctgttagggtgcagggtgacaacgggggacctgccctgcaagttgcagctgggtaggaatctgagtgttgagccctgcgttctgtgagggctctggctttgtggcacaggacttctttctccagagcagccctgcttcctgcccagaaccagaggacagtgactccacttgcctgccgtttgtaaagcagttgctttcagaaaggcaatgctctgttaccagattagggctcctgcaagaatcaggcagggtgacaaggcaggactcatccctgttcatagaagagaatatggagggtttgaggaatgacatgacttgctggaggccacccagaaaagttggacttggtccagagtatcttttgattttcatagttcttcctgccacaccacagacctgagagtcccagtatactgggtctaattcagcaaggatgagagacggagacagccaaatctgagggatggggctgtggggtcctaggattagcacaagcttgctctcctgtgctagaccagagcagctgtcgtggctggggaaggctgggccctttgaagacaagcaggattagcccttgtcgtgaccctcacacctgaacccagtaccaggctaggtggagccttctgccagtcctaggaacaccctgaactccaggttccaggctggggcagcagagtgactgtcacttgggctagatttggagcaattgtcttatcggggaggcaacaagagataagggaaacagagcaactggggcttgcttcctggcccggtggtcacctggctgggctgggtggccctgagcttgtggctttccctctgggcctcagttttctcatctgtacactgtgtgtgtggtagttgggtggtggtggggatcctcaggaattgctaaggtcccttctcaagctttggtctttgatcttgtgattcagcgggaaatgcccaaacgcatcagatgaggtttgtatcttgagcaccaggtgatggggtgcagtcaggcccttggccccaggtgacataggaagggtgagcccctctgcggccatgtcaacaaaaagtcatcgtggggaacaccactaaagggaatggggagaaggcatagaaaggggtgagggtgtaaggctgggcacagccccgtgagaggttgcctggtagggtgggtgtcgggaggggactgtggccactcttctctctggtgttccctgcctcctgtgcctgcacccttgccctgaattcctccccaccttctgatgtgggcactgaaattagatgtcactgttgccactgagaggcagctgtggcctgctttacacaaggctctagtggggagagagggcagggttggaggcagatccagagtggcctccagtgcaaggccgaatccctttctcagggagctgccaagggcagggggagggctcctgcaggacctcctctttctgagatggcctccccacgcgatggcctcacctctcatttttctccctattcttccctccatgttcctttcttttcccaagacatcttttcttgcatttcagaagatctggtggcctgtcctcctgaagctggggtagctggaggctgcagccagtggggtttctctcccttacacacacagacacacacacgcatgtgtgagcacacacacagatgcacacacacatgcacacattctcagacatgcacacacacgtacacactcacacgtgcacacaaacgcacacacacatgcacacactctcacacgtgcacacacatgcacacactctcacacatgcacacacacatgtgtgagcacacgcactcagtgatttcctgactgacatcgggctgcccctactgggaagtgcttcctgtgtaaggacagggtcctctgcagtgggaggtggaaggtttgggcgtggctgcatatcccctttgctatttggaacaaaccatttgttcccctgtgaggcagtatcctgtggggccaggagcaagaacggaatgctgggactcaggaggcagcctctccctggtcctcagcgttctcatcttaaaaatgggaggttgatctaatggggcgagtcagaaggggtctgagatgtcactgggtctggggtccaccctgtgcgggaatccctgccccagctgtcctgggtggtggtcacacagcgcctactagaagccctgcaggagtcacagcaccttgccttatagggacttcttgctcattggaggataacagtgttagaacctgcacctccttatcctccattctgtgattatttattaaaggttcactctggccagtgtgcctcccagggccactggttgatgaaagtggtgcagcttcagtggattactcttagaggccccagccccatcagcgggtgcttcatcagggcagctgtaaccactgtgtgcccgggactgtgccaagcttcagcttccccaccaccttaatgaggcggcatgtttgtccccatcttacatggaagaggctgagactcaagggttgatgggccacagccatcagcttggaagttctggagcaggtacaagcccaggtgggctctctgcttccagcctgagctctcaggctctgtgcctttttctgagagatacctgctcttagttaccctgtctgtaaaatggaaataatttcacttgcctgttggatgtattataaggtttaagcaagacaatgcatagaaaacacttaattcttagttgctggcacctagttctggcttgttcaatggtggccaacactcttataatggactctgcccctgcatgttcccagcaaggctactgaaccttctctgctttttctttggagcatggagttataatgcctgctccccataagaggtgctttggccagagtgaagtcagtggtggagagaggggcctcttcctccaggcacaagatctgtggctagcctggtggctagtctggccggctggcatcaggctttaaatagctcccccatcactcctcccagtcctgcttcccacacatggtaattaagctcacaacatctagtgtaagcaaataataacaagggcattatctccctttagtctgtgtttttccttgcctatcataaagtaattaaaataatgaatgccttgtaaaacaataggtaagagggctggcgaaatagcattatctgccacatacctcttgtgctatgaattactgatgcagttaaccactgtgactggagggcccccctgcctcccagcctttttcacgttgatttctcctctccagggtctaccaaggggctgtggaacttgggcccccaggactgaggagcagggagctatcttccaggtccccacgtggtggccagggaccagttcagaaacatcctgggaggcttgactcaaaaggaaacactagagcctcagatgtgggacgatctccctgccctcctcttttcctcacccctccaccaatgtccaatattgaaacaagcaggtggttctgtccttgggtgaagggagaggccaggagagagctgggggtgaagatccatgtctcatttcagcagtcaccgagccatactagggtagtcaggagctgtggtccccaaagtaggcttccaagcccagcagcatcagaagtgcctgacatcttggttcgaatgtaggttctgggatgggcccagcacactgtgtttcaacaagccctctggtgtgcttatgatgcccgctcattgtgataaccattgctttatggtgtcaggggcacgagaagaagcaaggggtgctgggataattgcttgaacctgtgttttgtgctattggacactgtttaatcctgacaatgcctgaggggctggcagtactgtccccatcttattgaggtcccacagcggtggcagagctggattttcccccgaatctacaccttcagttaccatggttgaccctgtatcagggcctccccatcctcctaaataccctcctgttcagagtctcacagggcagaggctcagggaccagggcaagacctaacaggtcctatctgaggctggcctgggaggcttgggcagcaggtcccacacatgtcagcaggcagcccccagatacatctgcccagtggcctccccctcctgggcctcctcttggatcattgtagctctgtggggcttaacacatttggaaagaaaatattagcgtccagggctgcaggtcccacttttctcttccccagcttccctgagccacaggcagccagagggagagaagcaggaatcgggaccagcttcctgcctgccgtggccaagtccccaagaggatgactcaccagtgcaccctccccacctgcctcccacgtgcctggcctccctctgccccgccccctttgtcactgcagacaaagcttttcaccactgtctttggttcttccccttactccaaatcacaatgatccccagtgtggctttgccttgggaattaattccagagttttaaatgatgaacataatttgctggcatctttttaaacatcttcatctgcagtcatagttgcagtgggtatttgtgttggggtccagttaaatgtacattgttagataaataataaggttttagtataagcatgtcccatgtggtatttggaatatacttatactaaaaagttatttgttgtttatctgaaatttaaattttactgggtatcctgtattttatctggcaacactaaacccagcctttgtagctaacgaggggctgatactcatagccctttctagtcattcattcatggttattgagccaactctgtcccagacactctattaggcaccaaggctgcagcagtggggaaggcagacagtaagtgaaagaagtaaatgaattattaagtatattagcggttttaagtgctatggagaaaaataaagcagaaaagtgctattggaaagaaagtgttgcaaatttaaacaggtggccagggaagacttcattgaaaaggagatatttgagcaaagacttaagggagcaggccataagtctctgtgggagaagagtattccaggcagaacactcactgtatgcaaaggtttacagtttcggcccctgtgtggggctcagttatctgatgaaatcagccttgtttcctcaagcacattttaagccagaaggggaatgtattgtctcctgtaactggaaaggtctggtgtagatttcaggcacagctggatccgggtgttcaaatgatgacatcagtagtctattacttttacttttctctgcagtggcttcattctcagggaaggatgacttttcctattctttcctgcaaatgttccacgcttgagtcttattggcttggcatggatcatgtgattattaatggcccaattgctgttggcagggggtagaaaggactccaatgttggagccaatgtgaggccatctgtcccctttgaactacatagactgagaggaagagataattttcctaaaggaaagtgggggtgctgctgtgaaaaggggcatagaggctgggtaggcaaagaccacaggacatctcccacactttcctcctccctcctcagcatgccctaatcttagacagattgcgtttcctcttgctttggtattttctttttctttaaaatgggaggagaccagaactttgggaggctgaggtgggcggatcacttgaggtcaggagtttgagaccagcctggccaacatggtgaaaccctctctactaaaaatacaaaaattagccgagcatggtggccgcgcgcctgtaattctagctactagggaggctgaggcgtgagaattgcttgcacctggtgggtggaggttgcagagagccgagattgcgccactgcactccagcctgggtgacagagtgagacttcatctcaaaaaataaaataaaataaaatagaatagaataataccatccttctttgtttcactaagatattttaagaggaaataaagaaaatattcttttttaaataaaggctttaaaaaaatcaaaggcataatttaccccttctgctttactcctatacctttaagctagtttccatctcagctggggaccccttctggctctggttctttatgggtagagcatgttatttaaatccattgttccctatgtcttaactcttgctctctctgttgccaggaggcccagaagattaacaatggctcaagccaggcggatggcactctcaaaccagtggatgaaaaagaggaggcagtggccgccgaggtcggctggatgacctccgtgaaggactgggcgggggtgatgatatccgcccagacactgactggcagagtcctggtgagtctccacccacttctcacaccaggaggccttgctgtctgggccaaggtggctttgcttatgagacgtgatattccccagggtcttctgcaggaggctggctattgggaggtgggggtgagcagcaagtgctcccgcgtggtcatggaggagaggctcggttccttgtgtacagtggtttgtggagggattttcaaggagtgggatttgcagtggagaagggttgttgggaagatgtagcacatttcctctgctaaagcacacatgcgcgcacacacacacaccctccatcatcttggagaggagaagagggttaaggaaatataccagaaactcatggaagggctacaaatgcggggatcctggggagtgctgagtgagtgtgtgtttggtggtcttcgggggatgttcttcttgtcctgtggtagcccatagggaccccctcttgcagcagtttcctaattttctgcagtgtgtgagctgggccctgtgcacggtagaaatcagtcatgctgatggtggatgcatcagtagcccacctgaggctgcctggcccgtgtacctagagctcgcttgtgtgcccttttctgatgagattgtctcctaagcccacctgcaaccagggctgattctgccccttctctgtatgtttccaacatctctctgatctgcttatatgaagcttggcttcactggctggcctcatgagcccttggtttttgtcaaggatcattactgggacaggcttatagtgatcaaccatcccagtttgcctgagactgaggggtacatgagacatgagtctttcagtgcaaaaactgggaaagtcctgggcaaacagggatgaattggtcgccatagccaggcccatgctctaggaaagccctagcttgctttcttgggtctgctctgggtcaggagtttccctgagaaggatattgcattcggagtgatttctcattgtgattctggaagctgttttgtttgggccacctgtcctggcatgaagctagggctcagtcaagagtcatttggctcatagatggaaggagtagggacatcctgaggcctgcgaggctcaaagaccaggcagggacactggaaaacagtcattatctctgagtctcacagcaaaaactcagtgaagaggtgactgtagatggagggaggtggtgagaatttcacttctcagaatccttcttggggagaactcaatgttatgtctgggatcaatatcacacacacttttgtgggaaggagtgagagaatgaacgtggtgcttgagtaatcaaaggtgctggccacacagccttcaagaaagacaggttctgttcaccgagggatctgccgtgagctgtgtgctgaagggtctggttatgaaaccatggctgatgtcaattgatggcaaaatggaaagaggggacatttaaagttggagttttggaggaggagagagaaactggtgaggtcagtggctgcttggaggaaggcagagagggagacaattcagtctggtgtgacccaggagggacagtgtctagtggggacttggaggtgacttgctgttggctgagctgtgtaacagcacctctatctctcctcctgcctcttgactgaagtctccattgctctttcatgcttgaagaggagtggattctgcattggaaacttaagagaggttgaattctgagtctgggtattcatggggacaaaatggaggtagtgtattctatatgtatggtggtgatagtgaatggggagcagcagacagtttagctgcacaaatgtgacacttgttccttccatgtggccattatagacagttctaattttcttcatcagcattgcaagagttactgaacactaattctgggccaagtgtatttgtttcagctctggagaaaacaaggaaggatcctgattctattgcaccatatgcggaagttattgaaggaatgcatggaggataagtgctatgagtacaaacacggtgtgcacttgtggagtgtggggaggggctgtaggggaaagtagggctgatcagaaaagctttcatagggaggaaagtctttgaactaaaactcccatttcaagatgagctgctttatggcgggaagatataaaaaataaaaacatatccaggcttaaacacaagaaaatgaccactaggtgggctggaatttgtgaagaatacttaataagacagaatgcatttgcagtgagcttttaagtgtgagttaggatcttgagagttaaaggagaagaaagccttcaaagtgaggagcaggaaaaacagagaaggagcctggcgctctgggaaatggggggtgcagaccccaaagtctggggaagtgtcctggagacagcctggtggggctttaaaggccatgctaaagaattttggggccaggcgtggtggcttacacctgtaatcccagcactttgggaggctcaggtgggtggatcacgaggtccggagatcgagaccatcctggctaacacagtgaaaccccatctctactaaaaatacaaaaaattagccagtgtggtggcgggtgcctgtagtcccagctactcgagaggctgaggcaggataatggcacggacccaggaggcggaacttgcagtgagcggctctgctgagatcgccccactgcattccagcctgggtgacagagcaagactccgtctcaaaaaaaaaaaaatgaatttttgaagtttgtagaacaaggagattttgaggcagggggtgttgtacagagagagctgggggacaagtggagactgaatgggtgaggctagagcttggaggctataggacaagttagggcagtaagctactgctttagtgatggcatgggagcagattcctgatgtggtcctggtggggcacggtctgcactgacaccaagcagaagatgcaggtagcccatgtgggtgatatcatggaaatggaactcattgggcccagcacacccagcggccaccttgagactctcctggcaatcacactgttgaacgcctcttgtgatccaggcactgtgctaaccttatatgttatgatcagtttgaaggggaaggacaatgtcgtatttcttccgtatctccttattgctgttgtgttgtaggggttcattacaagaaaacaggccaatcttatcagtgaattcatctctgttttacagttgagaaaatcaagatatagcaagggcaattatttgtctaaaaacattcagctttgagtgacagagccaggctagtacctgccagctccctgtctcccagtctggtgctccttttgtgtcattacttcccagtcgaagataatgccttttcttttctaagccactgacagctgtcactttggctgtgacattttgacattaccatcttttagccaatttggtcctgaggatgcttggcctgcttgttaaacatttgcatgtagaagcatggtccactcaggcctctttgcctgagcctgcccaaggtgccagctgctctctgaaggtctccttggagaaaatcctgcccaggctgttggggccatgcagagcaagtgggacctgctgcacagaaagcaggcatctcagagctccaggcggtatcctgagaataggcctgccctttaggagcaggcaggtccctgcactgaacaaagaagagatttcacaattaagtaatggcgggcaagagaaagcagcactgcctgttcagaacccaaagctgtgtttgtcttgagccgtccaaatgtttatccctgcaacaatgggaccaaagcaagaccagacagctggctattcagtttcccgtttcaatttttaatttgttttccttgatgcacgctcaggagcttggcctcctcatctgggcctctatctcacctgtctaattgtcacaggtgtgaatctcgaagctgggacatcatgagtaaggtccagctggggaagaatttgccaatacaacctcagaatatctgtaggatctcccagacgagcacatccgttattcactaagtgtttactgctcatctgtacctggcactgttcaaggcactgggcataaagcagtgagcaacagagatccaggtgtgaattatttatattgataaactagatataaggatgcagagctcaatttaagaaatgacaaatgataattgccattcaccagtgctttttatagtcaacgcctggagcctgattatccacatgataaaaattccttgaccccccggctccagatctcagaatagcctgtctttgcctcctctctcaccctggcactcaggctcaactggccaaaaacagcaggactggacagagccttctcttggagcacgtggctgagggattctacattaaagtgaacaccaggctgtcaagagtactgcttccttttatttttttcttaactaaacaaatgtttattttctgattataaaagtaatatatgtttgctttttttaaaaaaattgaaatgtgctggaagacgtgctgataaattccactgtgggatttggagtcggctcatgcggagggaaatttggatatagcagtcaatgtcgtcaggatttctcttaactgtttgggtgtcattgaggactttgttcactgcatctcatgttacctgctttatgcacagactcatgggataagtagtgttttgcaccagagattgttgtggttttcctggtgaacatccagtgagcatgctaaatcgagaaagggatcatgtctctcagtggtggctgctcagagccaagtcggtggcttatggaaaatacagagtggctcaggtttgcgctctgtgtctttgcacccctgctctggcttgtcttcatcatctctcctctcattttccctttgccctacttttcttactcctatttggaatttacatgtatgcagttatgtgttccatacatttttgtcaggtaaattaaatccccctaagaataaggtggtttctaaataaagagggcaagaaacgtatggtgtaggttttagtatagtttggttgtgctgtatagaatcataagccaaagtcaacagtggtagtcaaattcagggttggtaagtttttccataaaaggccagatagtaaatattctaggcttgcagaccatgtgggctccacgactcaactctgccacagtagtttgaaagcagccacaaacagccttggtgtgactttgttccagtaaactttctttatagaatgggagaaaatatttgcaaacaatgcattcaacaatggcctgatgtccagaattcatgaggaacttaaaaaactcaacaacaaaaatcaccaaataacatttaaaagtgggcaaaagatatgaatagtcatttttcaaaagaagacatacgaatggccaacaagcatatgaaaaaatactcaacatctctagtcttcagagacatgcaaattaaaaccacaattagatatcatctcacagcagccagaatggctattattaaaaagacaaaaaataacagatgttggtgaggatgtggagaaaaggatcacttatatggagatgtaaattagtacaacctctatgaaaaacagcacagaaatttctcaaagaagtgaaaacagaacttccatttgatccagcatttctactaattggtggctacccataggaaaagaaatcattatataagaaagatacctgaactcctatgtttatcacaacactactcacaatagcaaagctatggaatcaacccaagggtccatcagtggatgattaaataaagaaaaaaaaaatacacacacacacacacacatacacacatatatacacacacatgcatatatatcacattatatatgtatatatattacatttatatatatacaaacacacacaataagatactattcagccataaaaaagaatgaaatcatgtcttttgcagcaacatggatggaactagacaccattatcttaagtggaacaactcagaaacgaagtcaaataccacatgttctcatgaataagtgggagctaaatagtgtgtacacatggacagagagtggaatagtagtcaatggagactcagaatggtggaagggtgggaggtggcgatgagtgatgagaaattacttaatggttgcaatgcacgctatttggatgacggttacactaaaagcccagacttcaccactgtgcaaaatatccatgtgacaaaactgcactcatactccttacatttatacaaataaactgtatttatagaaatagggggtagagaaaacagttgactggaaggaataagttccagcatgtgatagtacaatagggagattatagttaacagtaatttattgtacatctcaaaatagctagaaaagaattagaatgttcccaacacaaagataaatgtttgaggtgatggttttctgttaccctgatctaatcattatacatgtaccaaaatatcacatgcatcccccaaaatatgtacactattatatgtcaatacaacgttttaaaaaaagaaacaggtggtgggccagatttgtttcacacaccatagtttgctgactcagtctaatttatccccttgttttatatataaagaaattgaaagtctggggctggaggcgaagagattctctaaggtcgagtagcaagagtgtcacactctttgtaaaggagcgttacagactcagtgatacacacacaaagataaatacaggcacacacacatactctcactatccacattgtcacttagtttctgcatgttcatattcatttccatgttgatctcacagcaactgtctccctagggaaactatgtcctgtggtgaaggacagcctcacctcaacttgggagcgacatctacactgcctagactttacctcaaccccctgacagattcaatgttttgtgtgtctcttcaaagactggtcttgccaaaatagctaccagctcctgagcaaagctagagagagcccttagaatcactctttgtagttactttccccatattcctatgctgttacatctgtgtattgctccaggaagcttacacagctaattctatgaactgaaagcatatgctacttgcttgaatgtatagggatgatttatcgatgtaagaagaaagaaaaatatcagcctctctctttatccccctaaatatgttgcatgtgtggcattttacattaacgttatatacatagcctggaccatttcatctttatctccaagggcccaaaagaaaatatgtgtcaaatatgcctttcaaataggaataatcctattggtttaacagagttaaatagatgtacattcactgatgtgctgtttgcgcatgaaattagactggttgaacccagtgggagtacacatgggcacacacataatcaaatatatcacattcattgcattcacttctgttaggtgccctatggaggttgtgacatttcccatcagtatcctctacttttctttctcagtggtgcctggtggcaaattcacacacacttctctctctctctgtctctgtctctgtctctcacccccctcatctatgccccagcttttattatattttaggcaaatctatgtaaaattcttacatcattggccaatgccttgtgtagcagaaagactagaggtttcacaggactgtacttttagtaagaatgtcccatagtgaataggtatgtcctgctctctgctattgggaatcagttggagttttattggcattgttttaacactcctaagggaggcttctgtttaaaggaaccatatgataatttccttccaggacttaatagtggttctgtatttcatcccatgcatagatactgaaatcacattatgggtatcagtcaaaaagtcaaagaagatacattctttttttactattaaacatgaaattttgtctttatctaatgaaagatacactagatttgcactagatttgttatttttgactcaacatcatttacccagatgagaaaacatgagtcagagaaataattgaattgagcagtctcccccgacaggtagtgagctgcctgttactagaaatattcaaagagcagcaggatcgcatttcatagtgctgttgctgacagttggttagactttatcctcatggctttaattaggttccatagaacactagacccacgaattgttcccggataaaaatggttccctgggaacttggatagacttcatttctcatccccctcctcgagattgccaatgcatatcagcatataaatacttacagaagtcctgcagtcagaaagcggaaaggctctgttttgcccagcattttccattttcatttccctgtggaatcctttccccatgtaatacctgtgggcatcacatagcactcactttgggaaacatttaattagcccagggatcagttagttatagcctgtgggacagtctggctcattgcctcttttgtgtggttcataagctaaggatggtttttacatttttttatttttttttcagagacaaggtttcactctattgctcaggctggagtgcattggtgcaatcatagctccctgcaacctcaaactcctgggttcaagcgatccttctgcctcagcctccctgatagctgggattacaggtgcaggccaccatgacatgctatgttttcttaaattttttgtactgatggggttctactgtgttgcccaggttggtcttgaacccctgggcccaggcaatcctctcaccttgacctcccaaagtgctgggattacagatgtgagccaccatacctggcctaaatggttattttttaaaaatcaaaataagtgtattttgtgacatgtgaaagctatatgaaattcaaatttcagcgtccataaacaaagttgcattggaatacagccatgctcactcatttacgtatcgtctgtggctgcttctgtaagaagctacaaaggcagagttgagtagtatccggagtccaaaacacccaccagcctaaaataattaccatctgtccctgtaaagaaacaattgccactccctgtatgcctgtcaatattcctcttcaagtggcctacaggacttgctccataagttacctatggcataggtaatagataagatataacatctgtccccttctcatggggacgtgtctacattcacttccccaagctcaactaagtactgcattagagatggagaggccagagccaggtgggtccccaagttccatagcagattcccagctggggtgaacatatggatttccacttcgcaaggtcaggagaatatgtctgagaattttgtagcagcatcattccttgagtttctccatccacctgcccactgcttcggcagcccccacaccccaggccctgctggcagctcagagtctaagccttacccccaagaggacccctgatcagggcctgcaggccaggcacctcagctcgcagcagcttctggtctgcaggcctcgagccatgtgctgggctctccggcacgccctgtaaagagcagctgttaattttactagctggtgtgttggctcctctgccctccccagggctgctgtgaaaatgaaggagagtttcagaaatcaaccctcagttggctccagagtgaggaagagcctcctggtccagggacagcccacttgatcctggccactcatctctggctcccaggccctcagggctctgatggcaagtgctggcatggctgttttccctctcctctgaagtttccaggtgcatgtgggtgcctgctttggccttccatcccattgtctgtctgcccatccatctatgtccattcatccacctgtgtgatccaccgacattgattggtgttccctagtatacagaactgagcgtagcacaggtcagtgggggcctggtaagcaagcagagcacttgcagcctctgtgcagtcagcagccagtccggcctgcttctgccggtcctgtcttgtctctgtccgctttgcttcagtctctgttggggcctgggagtgagaaaccctgcccctttgtcagtgcatcatgatctgaactagagctcctactcttttttgatctccatcttgctccttgtgtctcgttctcacttgattggaacaaacaaggaggatgggtggagcccatagcagcctcaaaactcacttcagctcttgcattgcctctctccctgggacacccatcttgggaaggagctgctgtgtgtggtgcggctgggcagttggaagcccagcctctgcagactcctgactcccagctccatctgtctcaggggcttggcttttaccctgggcgagtggcttcattgtctcatacctcagtttcctcatctacaaaatggggacaataatagtccctgcctcttaatgagttaatgcatgtaaaatatttagaacagtgcctctgacatggttagtgcttgataagcatggttattattatttttgttattgtgtgtgtgagcccggtcaccatgtcatggaggaaatgggctggtatggagacagacgggtcagggggtgaagaacaaatccttttctggggcaggggtagaagaacagcccttgagcctccccaaacccagacatcttccaagagtgctgagcagctctgggcagggccatctgaaaggctctgaatgccccaggcaagccctggtttggatccatccagatgatgatgtttgctctgtgcacacacttaattcaggcttgtccaggctgcgtcctctttgcagctggctcatgccagcctgactcaccattgtcaaattggccaggaaattctcacttcatatagcctccctgagctggctggggactggagaacgggctgggctctccctggagctgtacgttgtgggcgcatgtgtcacaggaaatgccttggcaggacaacagatgagtcttaaggaaaaagggtcaagtgcacttactgtggtctccgtatccacttctccctggaggtggggcgaggctgacagggcagggacaggctggtttcggagggcacatctgcaccagtatttggggaggtgggtttgatgtacattttgacaggtagtgaccacacattcattgaaaggagatgggaaagcgtgtgaggtcaccagaagataaagacccagattctactgcacatgcgaggcagctcctctgagctattcctccatcccttcatccattccttcaaacattctggagcacctgctcggggtcagatactgttcaatgtgctggacatatgttggttcattcagcaaaagctgcaaagtgcagtcatccaaagtgttgaaggtggaaatgttatgcttgcattttctagaatgatttggggtggcaaggtttctgaagtagggtttagtgataagtcagaacctgtgacccatctctcagtcccttggacaggcctgggagctcagacattctagtcctgattgcacatcctgtgcagttctgcagctgaatcccaggggcctgggcaaatatgtgagtagttggtttccctccctgcctccctcccttccctcccttgcctcccttaccttccttcccttccctcccttcctttccctcccttcccttccctctctcccttccttctttccctctctcccttccttccttcctccccactgccccctcccacctcccccactcctccctcctccctccctcccttcctccctccctcccttccttcctcgcctcattccattcctccgtccttccctccctccttcccaacccatgaaagctggcgccccctggaggcatttcaggaaatgaaatgtctgtatttgcggctactgagttgggctgggagacttttcttacccaggttttcccccaaggccttcagagggtgctgatggcttagcactccgtttttgtcagaaaaatatccttagagcctccatttcagctgcgagaaagtttgtttagcagggagactcaaaaatagagatgatgatgacaaagtcatcagcctttgtcgttgcaggggagtgcatgcttggaaagtcacactcgggaccacacgcaagctgatgcttccaagtttagtttacgaggctatgtttaggaggaggcagactgactcgtgcctacgggccccaaacagcccaatttggtgcactaaaagcctcatttttagactctgggtccagagtgaggctttttccagaaaaaaacaaacaaacaaacaaacaaacaaacaaacaaaaaacctacttcagggaaatgacaacaacagaaagccaccatttgccctaaaatttttattgtaaaaactattctctcctgtttgagtagtgagggatctaggacataacagtggcttctctggctttcttaaggaatcagggcacttggaaactcaattaaatgtacccaagcctcttaagcaccaaggctatctttttgctcatccagttaatttcagtttgtaaaattggccttgtgctgacatgatggagacggggtgagggtgggaagccagggtcctctgtgagcggaagcttgcttctctgttcacaagcctccaagggcacacatccttccctggggcatcaagggggaccattaaacctgtttgcaccacgtccctgggagagcaaacttctgggccttccttgtttactggaggttggttaattcggaaggtagatggactgggcatattggttccccactggcaggagcagcccaggattcagcaggttaacgcaaaggatcgagaaactatcaccttcctagaactgttcccagacttttagcaaacaggctgaattttgacctttttcccatttttctttttaatcctccctccccacatgttttgtggcttttggtgaaatggctgtcctaagggaaacaggacagttcattgaaaaggagagagaaagtaaagacccctttcccacaccaccttccctcagatgcagcctttgcttacactaaaaatagcttgaaacagaggctgaatcacaaaaaaaaaagtggcatttcaggggacagaggctgccagctccctggctgctgctgaagtctgttgggtttgttggtctctgagccccgacttgcccaggaaggcgtggggtttggaagtgtactgggataggtccagaacattctttttgtttctagagcaagggcctggttgtgtctgccttggttggagagtctgtccagagctaattatatcagcaggcactgatagagcctctgcctggtgttatgcctcaggggtggaaaatcacttcctgcaaaggaaaggagttgttttcaggagctccttaatccctgaggcacctgcatgggctcccagggaagctgccaggaggttattgtttcctctgaaccatgaggtgggcaacttggtttcttggccacctgagatctctccaggaaaaagctcagatcatcagaaagagagaaaacagtttactcaccttggtctatgctgtgtgtctctctggcccttggggattcatgacagtgtttgagatcaattctggatatgggagaagagaggcaagtcacttacttttatctgaggagctgcaatcagcagaaacctggatactaaccctggctttgctatcacttttctggttgaccttggacaagtcaattccctctccaaggcctcagcatctccataaatagagggggccgcagtagtttttcagtagttcgttcccttgcagcccaaaatatctttatgttttcttatccccttcactgtccttcatcagcaaaggccacaagtgttaggctcacatctactgtgcccttggccctgtgctaggcaccaggagaactgcaaaaggagagagaatgcacttttcttagctgccagagtgattggcgtgaagcagagttcatcaaggggtgtctctgcatggctctcccatggttttgcctccatttgaagtaaaatctgaaactgtgtccctggcttacaaggccccgtgagttacggtgcctgcttttgactcacctccaatgattcttttccttctttgctcctttctagagaagaagcaaagcctataggtagaagcatgtagatgggcctgaggcactgggcagggggaaggatgccgtgggaggagggggccatattccaaagggccagctcaatgagaaggagttggcttcttttgaatcatttcagccatggagctctcttttggaaccttcctcagttggaagcctctaaggggatgttgttcctagttggtatcaaacgtggtgaccccactagccccaaatttgactggaagagcctcctttccaattgagtatcctctgcttgaggagctcttgggtgagataacagcccctatcctttgctctttgtattgcttttgactgaactgctgcaaatcatggggcccctgaaagtccatccctcctccagaggtagaagcgcctccatctctgtgtacctgaaaacaataaaaggcatgtttatttaaaataatgactgccggaggcccccaggaggggctgaggatcgaggaaacattactgtggccaaagtcattttttatttctggagcaaggtagcagactcaggggggtggcaggagctgccaagctagcccccaaatttatagcaagggtgttaaacactgtgggtgatcagtggagttgacattgcagaaattccccaaatgaaaattccttgtaggttaacttttagatgaactttaaaaaacaggggcaacagaccctcaatgggctatttcaagtgtttccaatttcattaacatgatttaagcaaagactcccccttgcctccctggatgctaaattagaaaacatcactattcctctgcccttgtgcctagtttgcaaaccagtgggtttatctggttgttttccccagagttggagcactgcagctgtttccatagcactgcggcccacagggagttgtgtgttgggggctcagttgttgtcttacagaaaaaaaccttgtaaaggcaattcagcaagccacccttctagcaccaagagatacaattcctcttcccggggctgagatggagagatacagatagagagaaaagaaataaataaataaccagtttctctttcatttaactctcagaaacagcctctggtgctaattatttctgctgtagattttgtcagactttgaatcccaatccttttgccataggtggtatattttagagatgcaaaatgatataaaaaacaatccactttcctgaaagataattttgtgtacattaaacagacacattaagccatttacaagagagttgtttgttctcagggatttggaggaaatctgaatttctaattctgggctctttaataattttcaaaagaactgaggctaatgattaaacgtctttgaacttccccaggctgtcttctatcccatgatctcaaagcatttgaaaaggaatagaattctttaccttgatgaaatcagcaggagagtagaggagacaccagccccaccaggagctttgtggcagaatgggggaacgtaaagtaaagaggctcaagaaaagtgcacaaggtcactttcagagcttcagatgtggagttgaatgaagagccttcataccagttcttatttcacagccttggctgctaagacttggaaagaaggccaaagagaaaagaaaaccaaggtaggacttagttaaggatgtctataatgagattacacatgacatgcaatcttatctggctctagtgtttaaggattagaagagatcaagtctagcaatggtgaactttcatcatctttcatcagctttcatcttctgggttcattctgattgatcagtagcagctacagagaatatttggccaaagatttaaggttcagcagcaaacagtcataatggctctgctctaaagaattccgagggctgggtgcagtggctcacgtctgtaatcccagcactttgggaggccaaggcaggtggatcacttgaggtcaggagtttaagaccagcctggccaacatgctaaaaccctgtctcaactaaaaatgtaaaaattagctgagcatgctggcaggcacctgtagtctcagctacttgggaggctgaggcaggagaatcacttgaacctgggagtgagaggttgcagtgagccgagatcacgctactggactccaacctgggtgacagagcaagattccatctaaaaagaaaagaaaagaaaagaaaagaaagaaaagaaaagaaaagaaaagagaaaagaaaaaaaagaaaagaaaagaaaaagaaaagaaaagaaaagaaaagaaaagaacaattccatgactgactaatgatgcctgccatgagtgccagcttggagggtggtagtactagtgttatttgtgccttagctacctgttctaggtcacattccctaaagtttacattatgtgtgattaaagtggggcttgtccaaggtcatttggtcagtttcagacatgtctcctgaccctgtctagtatttgataccccagctgcataggttagacctcagagaaacagcaaatttgtcagcttcctgtagcagccttctttttcttttcttttttcatattgcagcctgacttcagatttttccatctggagactttctttagtgtttggagagcagagggggtggatttcagagccacagtgattctacagacaaacagaaatgcaagcacaattttcctgtttgttatgtccactctcaaaattctctttgcatgaagcacacgctgatcacagccctcccactgcaaagccttcccctcagcccactcccgggttctttctcccaatcgctgcagatgcctttccctgtgccccactcccccggcactgtaaaaagcttttggtgggggttgatgcgtcatcatttccttccatcatagcctcaccttctatttcttcctgtttctcccttaatgttctttctcttagctattcatgctcacatcttaatggctgtgcttacagagataaatacattttgcctctgaccaaaaacagtttctgccctgacttgaatttaaaagcctgccagaattgcagtggggagcagaggcagagtcctcagtttcatcctgggagccataaaagttttctaagagtttatcatctccatcaagatgaaaatgggatttcaaggcttcaaataggaaagataaataacaaggaaaactccagcttttgtcaaagcaaagttctctttaccagttttatgagtctacctgttgtgcctgcaccctggcatctgtttcactgtggtatcagacaaagccttctccaggaatttatgcaaacctacgactggatagagaatttcaggcaattggtagagcttggaagacggctgacaagtcatattcttgggccgtaactcactctcagactcctcattcgttcctcaattcttcctcttccccttccagcataatgggaattggaatagaaagccctattaactgtaaggcctaggctgtgatttataggacattataacaaacgggactatggttcgttgtacttggctatcttttgcatttgaggtggccaggattctttgtcaggattagattttgcccccttggcctcagtaaatggctgcatgcaactaggaaaggctcagccagtgtttccagctgctcaagatgaccccatgtttcctttgaggaaagcagtgctatagagcacccatgtgccactctggatggccacgaaagtgcccagtgagtgctccttggaacttgtttctgatgtgaaagttttggtgggaaactcggggagacatattacatcctggtaggaggcacgtcctatggatttgcccttgatgcttctttttccattgtcctggcttaagccctgtgaccccttccttcactcattatagcagctacatgtcactctcctcatttgtcccatctccccgcttcagtccatctttcatgctattgccagatgaattttccccaaagccagctttgcttaggtttccccatggctcagagaccttcagtggctttccaaggtctaaagcccaaacacttcaagcaaatggtcagggcccctatcctctttccaacctgtccttcttctgctctcctccatgcactccatgtgttcaaatcctacctcatctttaagatgcagtgcatagtgtttcctcctctgaatccatcagtcttggagagtattcgcatacacttgtgaatgtgacttatccactctaaaggcaatgaggctgagtggttaagagcacaggctatagagccagactggctgagtttgacctttgttctgccatgtactagtgtgaccctgagccagtgacagaagacaatcgtagtacttacctcatagggttattatgcagattacatgacctaatatttataaagtacttagtacagtagctggggcagactaagtgttgtatacattgttaataaaacatagtaaactgtaagttcactgagagtcagaaacatgtggtttaattttataatcctctttgtcctgtgctgggctgaaacaaccttgaaccagattgctgtgaaaatgaaatttgaagagagagagagagaagaaatatatgtgaaagcacattgtcatatttttattcaataatcaataattcaataatcttattgagtatctggagagaccaggctctctgttgggtaattgttgatcaaaatggaatgagatataaatcatgtataaacacattgagtatgactgtgtagaagacaagtggcaaacattattcttctcttgtccccatgttacaggtgagaaaaccaaggctcagagaatctttaatagcttaggtgagatcacacatccaataagcatctgaactgagatttaaatctgggatctcatgactcgatgacccaggctgttttcatgttaccatggtgcttctcattcaagaatgagtgaaggaatgaatgggcataggaaagaatgaatgaatgggaagatctcaaacatacgtggctccagaaagagagcaaaccagaggcttgccatagaaagtgagttgtaagtcagcttgggcaggtagcaaatccctgaagccataaccatttgtccagtcgagcattcactatggtggtgagatggggcagtttcattgcctcccctttggggaccaccttgctacccctagtgtcatacctcagtgctctccagttatttccctctgtggcaagagtggctttattttcttctcttttgggtattacccaggacaaacagtggatgtgacgatggatggtaaaggtacgtcatcattccctctttgatgtgctttcatcataatgggcctatttggaaggtttccataagtacaggaacaatgcctctccactgggcttcgtcagccaccaatgatccgagcaccagggaaaaagtctggagtgatgctggctggtttccatggcaaccacggcttgcctcaaccctgcacacatgctgccctctttccaagtaggaatgtgtttatttattattggtccaacctgggagtgcctgtgcagctgcataggtgttgtccctacctctgccattgaggtcatgttctcaactgggagatgaaatcacagctgggtgatggaggcacggtatttgctccaccaggaaaagctctcatttaggcttcagatcttgtattgtccatcagcgtgatgccagtgatctccgcgggggttagagaggctgatctagaaccattagagtcagacaccatctagggtcctgcggtgaatcgcaaactgccccagagagctgatggtgacgcacaaatctttcataaacatacagcatgctgctgtcccttggagatgcccatgagctggctgagcacgcacaagcctgagaaactttaaacctgggcagtccaacaccggtggtcagtgagcatctgaaatatgaattgctgtgtgctgtaaagctgggagtagtagtgcacacctgtagtcccaactactttggaggtgaggcaggagaatcgcttgaggccaggagttcaaggactgtgcagtgagctatgatcatgccagtgcactccagagagaccctgtctctaaaaaagcaacaatgctgtaagtggaaatttagtacaaaaaaagactgtaaaaaaaccttattataatgtttatattgattacttattgataatattttgtatagattaaactccattattaaaattaatttcacttttttctttttacttttaaaaaatatgctttctagatggataatggtgatggctgagcgaccatgtgaatgtacttaataccactgagctgtatacttaaaaattacttaaatggtaaattttatcttatgtatattttatcatactaaaaagaaagcaaaaaaaaaaaaaaatctcgaggttaagcaaccatctctccaggcctcttcttcagcagtctggcccacatttctagaagcccccagcacacctgcacatttatttcacaggtcaagaaccagtcacaggtcggtcctaagccaattgttggcataagaatgagagcaccagggcttgctcagactaatcgaggtctgcccaggagtggggccagcatcagttttggtgaggtacctgcacccctgaacaaaatcagggttctctgaatgagggagggggatggaaatgactgttaggaggcaatcaacattataatcttaaagaaaaatgtacaagaaaattaatgtatgggagttacaagtgagagcaatctgaaaacttctttcctccacttggaatatatatatatatatatatatatatatatatatacacacacacacacacacacacacacacacacacacgtatatatatgtatatgtgtatatatgtatatatatgtatgtgtgtgtgtgtgtgtatatatatatatatatatttttttttttttttttttttgagacggagctttgctcttgtctcccaggctggaatgcaatggtgtgatctcggcttactgcaacctccaccttctgggttcaagtgattctcctgcctcaggctcctgagtagctgggattacaggcacccaccaccacaccgagctaatttttgtatttttagtagagacagggttttaccatgttggccaagctgttctcaaactcctgacctcaggtgatccacccgccttggcctcccaaagtgctgggattacaggtatgagccaccatgcccggccccacttggaatattatttgtctttaaatttgcatagagttgtaaataaaataagtgtcaaagaaatgtgccttctagaaaatttagaatgacctgtgtggtttgtcttatgtttcttctggacagcgatgctgataggggctcttctcctccaattacaaactgtcatcttggacaagctgcttcactgtgtctcacttgcttcatctgtaaaatgggaataatgataacacctgtttcatagacttgttagttaatacatgtaaagtgcttagaatgtgtctagcacatagcaggagttgaacaaggatcacctctcattaggggctgcagggggactggtggctgctgctgaagccttcagaacctcccttcacatgctcaccacagctcctccagcaggcagaaggcttactcggtggtgcagagaaattaccccaaaggaagcttttcatcagaggtggctgatgagtgcctgatggatgccttttcctccctagatggtcccaagatgactcttcctagatgaagggcctcctcctgagccttgttgtagctcagtggaaaataaataaagagggaacaaaaagtccacgaagaagaaacagtttgttgggtggcgcctctcagggccagtatgatttaattgacgtcaagcctgttatgagtactcatgtggctaggataagtggcattggaagccgggttgcccagcatccttgctctcagagccccacttgatgaccttcttaggggttagtgcctatcaggaggctgttttgagagtatctgtggggaagaagggctcagatttaaaactgattctaagtcaacaattcaaaaatataaacaagggaatttgtggttgctctcacaattaatttggaccagcagcccactggagacattgctgggaaccccaaggaatgtagggatttaaaaaaaaagtcattgaaacttagaccacaatcactgggtcccaacaggctctagtgttaattcaaattgctatctattgggtagagaaagagaatttcagtgccagaagctaccatagagataccttgtagttccaccttatactgccgagaaggaaaccgaggcctggagggagcccatgatgtgttcatgtttacaccgcaagttagtgttaaatattccattttttggaaggaattttacttacatgcatattttccattatgtttataaatttccccctattttaaattatccccattccctactaattgtatctttcattttttctttataaaccttataattctctaatatactatatatactttatttattttacttatcatctatcttcccctgtctccactaaaatccaaactaactccataaaagcagggctttttgtctgggtcactcctgtatggttgacacttatttcctggaacacagtaggggctgaatgaatgaatctgttgaacgaatggatgagagcctgaatgggtctcatagacccatcttggtagaagtaagttctcctttggtcatctaattcagagaaccttggggagaaatagaaaagccatttccactccaaatgggaatctaaggtcagaaaagcacagggttgcccagggctaagctgtaaatattggcattctgagaaagaggtcataagtttggagactttgcactttctctttggaaatggaaaagtcatttcatttcaccacatccactaaggtgcatgaagtaaacagcagacacgctggatgcttggggcatcattccttcaacagggacaacagctttcatgagggttctactaggttaagtagagaggagcagatttttcaggggaagggatggcagaagcaaggctgagaagtcaggcgtgatcattcatctgagctcctactatgtgctgggctcagaaccagatgtggatctacagcttatttatgggtgcatttgagggagtaagcgtttatgagtaggacaatgagggagagaaggattaacattttctgcccgtttcctgaaatgtgtcttaattccttcctaaggaaggctgaccaagaaaataatgcaagaagagaaagtctcttcaaaggagcccagctaggggctgtagatgaaaggattcctttgtgaataaaatgaaggaaggaaactgaagtggttcagtggttgaaccactggctgaatgaagacctgaaataagggaaatgcttctcaaaattagagaccaggctgggcttcctaaagacgactcatgcggagggaggccccttgagctggagggctcagtggaaacctagagacagaaatgagatgtagcagtcaagcagaaattgaagaatgttctttatattgatacccaccatgtgaagagggtgacagtgagtgtgatgcctttagatgcacatgaaagaactttcagacgacaacataaaatttccaaaatattttgtttaacctgttcacacactttcattcatttttccccctctgagagtaactatttgtaaccccaactaataatgaacactagtgtttatgaaggatttactaaatgccacctacaataccaggtgatttttctacatcacctcattaatcctcatatccctactatgagagtaggtaccgcattcatccccattcagtggagcccataggggaggaaactgacgtgggaggctggctcagttcccttagtgatggcagtctgatggaggtgctgacccaagtggacaccaaatgttttgtattgaaacataatacagtgcagcattatggggcagggatggggagctgctggcccatgagctggatatagtcttgatgtgattttatgtcattaaggaaacaattactaagagtaacacaccctttactcctgtagtcataaatctgtagtctacttttaaaatctactgataagcttccaaaattatgggttcctttaagaaagtttctctttagttctaattttattattgttgtttgtttgattgttttcttttctgcctacatatgtctgattttctcttcacaactgcatcctagatgccttccttagtctcttctgcttctcttctgttactcttgttttctgcttctatatatttatctgctgttttcctttctgtacttttccctcttctgtctgtacccattagtatcccttaaatgcctgtgaaaaggaattcaagtgagttcttattgcttattgggtagaagagggttttatgctttaatttaaaaatggttgaggatttaatagtatttctgtctttaaaagataataacattacattgcttttttactttatttgtattagaaaaatattctgactctccattaggcagttgtccttgatagagtgggaaaaaggctcagaattccgtcaagcaggtgtatcaagaagttgctatttggtctgttgtctttcctggttattcattattcagtttaacacagaaatcattaaacatacactgttttctatggtgccaaacatcaaatgaaacatgcttaggcctgtgaaccaagaacttctagaaaccagacaattaccaagggcgtcaaaatgtctcatcttgttgcttgtaactgaacagtgaaaatgagcgtacatgtaggggccatggaatgaggattttaatttgaatcagaggatggggtgaagagcagtcatttacaatattacacaagtcatcttacaatgaataataattctatcttgaaattccacccttcctgccatgtgattataaatttgtttataattgggtaagtcccaccagtcctgtgagattgcaccatgctttatgtttgcatacagtgctttatgcttgtcaaggtgctctgccttctgctgtcttatttggcatctaaacatcctaaataccctgaaagtaatgagacctggagctaagagctctctttacaatgaggaagctgaggatcagagagcttatgtcatttgccttgactacagcaagttgctagtggctgtagacccaatgcaaaccccacccaaaccagagccccacccaaaccagggcttttctcttgaatgcatatggcaagagagagacatcccactgtccattgtgttgaaggtagaaaatgcagaatgtggcagagtgagctaacccgcttggtggccctcaccctggcaagagacagattttccttcctctccctgaagggttaagacaaagaaaatatctgaaacttttcctagctgagcctttgctccagaactcagacacttttgcgacggaagtggggcattggggaggcagaaaaagccaatacataaaaaagcagcaacctcaccacctcacctgggtccccatgaaaccattccacccagatgagtgagtcagtgggtgttcttttcatggcctgtcggctcggtggcacctgaggctgcagtgacccccagtgctgcttcaggtgaatgagcacacagagcattttcagaactatggcttactctctcagtgtatagcagtttaagtgctagggacttctctgaactcattgaaagaaataaagcccctctgtctttgtatccctagaattggaagctcatgtatttgtgatgctggaaagggcaaatattcattgaaagaaaatagctcacatttactgaggtctcactatgagccaggcacggagtgaagcaactggttggcctcaccttgaactctcacacccagactaggagctaggcactgtgataactgctgttttacacaggagggaactcgggctcagagtggatgaatgacttgctgagggttgcacagctattaagtggtctgcctccatagcctctacttcccaggatctccagcaagggatatctcctgaggcagtggctttcacactcttagaggcctggagctctgtgtacactaactgaaacctagctgctttggttagaggattggggtcaggaggagactgtatcctcatggcccagcaagagttccgcaaaacccttgggattctcagtagagcagatcaggatgctaatgccagccttctctggaagtctgtctctttgaagttgaggtcatttccaccacaccccagagggacccatctagtcgacgcctgcctgcctggccaccacttccctactggaaaatcatcatttcccatgttctagttggggaaggacccagcagctctttctctttggcccatctctcttccttttatgagccagctaaaaggaatcccccagaggtcatctttgtccttggcgtgggaaagagagaggccttgtcagcaggtgggggaggtaggaaatgctgttctcctgtgggctgaaggtcagtgaaaggtgagctggggctcctgaggccagcaggttctggcacagaagcagcccgggaggaagctgccctggaatgtgctgtggacagacctgcgtagatcccttctttcccacgtccaggctgtcccagcatctctgaccaggccaaggtcacctaggcgcaggctcttctccttacctcacagacaaaaagaacttagcactgtaatctaagtgttcccactcctcatttgaaaagggaagcatttcatttttatgtatgtatgtatgtatgtatgtatgtatgtatgtatttatttattttgagagggaatcttgctctgtcacccaggctggagtgcagtggcacgatctcggctcactacaacctctgcctcttgggttcaagtgattctcccacctcagcctcctgagtagctgggattacaggcatgcgccacgactcctggctaatttttgtatttttagtagagatggggtttcaccatgttgaccaagctggtcttgaatacctgacctcaggtgatccacccaccttggcctcccaaagtgctgggattacaggcatgagccactgtgcccggcctcattttttttttttaatgaattaaaaaaaaaaaaacttatgtggcagttgataaaataattattttgaaattagccacttatcttctagaaaaaaaaatgtttgttgctcttctgatattggtaggagtttcttcctcttccaaggtgactttttggataacaccctgaggggactacccttcatcctttatctccatcgcagccattccaggccttctgtgactcctgggataaaataaacattagtgggcactgttccattacagggttcccttttggtgtgttccattgttatctccccctctcccccaggacctattctcccgggaaatgataaacctgggggctttagtggtggagaaggtctacagagcccaacctcaacttaaaatttccccagcctcttttggaagccaactaggtacctgattttcctgagtgggacacggcagccccctgggtggtcatagcaccacagtatactgttttacttacctgtatctcttggccatgccagcagcaagagcctcttggacctagaatgaccaaggaccgtggcctgtctgagttttaactctggatttagaagattggggatcttgtttcagacatttactcatcaacaaataccaagttcattgcaggtagggttcttggaaggtaagctctgacacgaagttgagtgtgctggaggctcatacccacgggaggaggggaaggcagcaggactgtgcagaggttgagtcgtgatgcaggctggatgcagccacagccagccccaagagcaccaagatggcctgccagcattgtgctggaatgagtgctgggatgggctgacatgggcctttattccatcactcccatcactcagaggaggtgggctgcccctgaagggcatgacctctggccaggtagctctctgcaactgagcaagccctgaagaagctgctgacaaccctctcacgagctgagcagcaagtccttcttgaagggggtctgtgcctgtcacaggattttctcaatggctgaggcactgtgttgaaacatggcagatcaagttggaaaggcttggtctctgtccatgaagtgcttgcagtgctgttgccctgactgcagtgcggtggatgctattatggaggactcttgtggtggctgcttggtagccccaggcaggcaccaggtcattaacagccgcgtgaattcccttgtcactcctaggagatatatacctgcacctctgttttgctgaagaagaaagtgaggttctgaagtgttgagtagctcctaggggtaatacggccagctgggaaagatgccaggattcaaacttaggtcggactctgaaggcagtgtgctttcctttattcataattgcctttgagattgaaggcagagccaacaggagcaggaccattgtgggtgttcagcagtgtcccctctcctacccttgctcatacccagttttagctctgtgcctggactctagctgtcccccgccaatggtgccacagctccatgccttttctgtgaccttcaccactttctctgcccttggggcttcctcttcctcttgacttttctcagcacttaggtgttggccataactgtttttggatgactgcattgggtaagtcccaccagtcctgtgagattgcaccttcccaaaaggcaaggaagttgtatggaaactggtttaggccttgtgtgagattcctttgctaacagtccaggaagctgtgtctggggcagcttccttcccccaaatatagatacttctccaagcttcctgtctggaatcagggtgttgtgaaatgtgggcactcattcagtcctaggggtcatggggaaccctaccagctttcccattaaacccagctggtaaaatggactcatgtctgtttgtttttggggtttgtattccctcctacctaaagaaactgcaagagaagggatagaaaagaccaaggcatcagcaagtctgtgcccaggagtgcaataatccttgtgtttactggaaggggaggctggcattgaacccatgtcaagataggtttggagaaaacccaaagatgccaaggccttgccttccatcccctgtgatctactacttaatcaaatagccaaggatgtgttaagagggagaaatgtgtaaatgtttagagagcagtgagttgtgagctgtaaatggccctggcatgtttataagaaatgagcaggccagaaatgaaaccccaatagtttttttgtgtggatagaattaccaaactgatggatggagggagtgttctggttgttaaatatttgggccttgggagtcttttgatgtagcaccttgtgacaactgcttgcaaagtgagctcagactagcttaaattagctcaggcccacatgttcgggaagggaggctggagtagattcccgccatggttgtttgcagctctcccttctaagagttcaggactctggtagtcagagcgcccaggcttggccagatcagggcacctggggaagggtttgtctctgcctcttactaccacatgaagtactcagagtctgggtgattgtggacagggcttcagatcaaggaaacttaagattctcaatcagccattgacatatgccaagaccaatcaatctttttcatctcatctcccattatccacccttcccacagccataaccacccactggtcactgtgcatgtctccctcctttgtcttctggtgtccctgccatggttccttcaggcaaagatgcttcttcaacctatccctaaataattctgcttgaaccttcagggtcaagctgaaagtggtacctttttcacagtcttcctgggcccaccaactggaagcaatcactgcctctactaaagtccacatcaattaaatagtcaattagatagatccagagtgaaaatggaaaccaccttctttttgcatcagtgggatggatgactggaaacatggatgaccagacaggtgaaaagaagaatggaaggaaacatgagtggaaggacaaacatagtgtctcctcgttaaaaaaaatactgtttcagctttcctaacctcacctgtaatagagctaggaacaatagccccatctcattatgtgagaattaaaatacttagccccaggtatgaagcactgtcccattattgttgttattttggaaaataactccgtaagatgttcaaccctatgaggaaattattctttttaagattcaggcttaaaatcaaatattcctggggcttgtaatttcccatgcagacctacgccctcatgttactgttgaagaaactgagtccagaagaggggagggagggacttgctcacactcccagagttggtggcacctgggtggcaaagtataattttcaaaaagttaaaattgtgactcatacaaatctagaatgtggacatgtcaaaaatgcatttagctcattaatgaggaaaccaacaagatggcagcatgagtttacataggcactggaggaagagtgttggaatgagattgctaaattagaaacaaaactggttaatgtcctacacgggagtcaattaataaactttgagattatcttttctcctgaacagaaaacatttgtatttctactaggcaaaatcctacacattaatgtgtaacttcacataatctggctatttagttggtagcaaatatcaagtcaacaaaggtacttactttcctctaggtaattaaatatttcttgggcaggctgttaaacattgctccacagatgaccttgaaaggacatgacacatttccattccattgcttgacccctgctaatagaaccaagtcttctcacccaagctgctcctctcttcctcttccatctctctgctgcatgcagggagcctggtgccttgcttccattttctcattggaaaaatgagggccataatacttgccttctccaccagactaattatgtccagttatgacttggggaaccaggcaagcgcatggaagaagatcacacaatcctggatccggaagaccttggcatccaagggaaaaacaggtgtgggcaaacaattgcaccaacatttggcaatggctgtggcaggcaagagcaaaggactgcggcgcctagagagaggagtgacttggctgagtaaaggaagagaaaaagattgagagaggaacactgaactgggatttccaagacccgtagatctgttggtgaaaagggagaagggcatggtcagcctggtgaactgcagatgttaagatatagggactaaaaagtaaggcactttccatttaatgtgcatatgctgagcttttgttatgtggcaggttctgtgtttagccctggggagtggcagcgatgggaacaatcgtgggcaaaacaggaaacaaattctagtccttttggagtgattccaggaggatgggggtttgggtggatttgagaggggaacaagggaagtggagtggaggcaaaagaggctggagagactggtcttgcactgagtgatgatatggttgatagctcctgaccaaacaattaatctttgttcagaactttccctttggaaagtctgtggctgccttctggggaaggcaaacaaatgtgaactcaagaagtttacaatttagctagggaaacaggatgtgcaaacaggaagaaccaactatgtgaaggtaggtaagataactgttgactccatgctttaaggaaaggagagctctttgtggcttgggtggtcagcaagaattttttaagcagagatactcttgattgggttggataaataaaagagcaaggaggacattgtaggaggggaattgctcccagcagagcctagaagcagagagattttccagggttcccaggagaagagattgaataagtgcagtgggccatgtggtgacacatcttgagtgtccagctggagaactggaagtgcatatcataacaggggtggaaaactcagaggttgatagggaatggtgaggttgcaatgaggggaccggtggggactttgaccagtggagcaagagtctttccagatgaagggagcagctgcctcacagctctggccagctgtggacatttggccagtttgtaatttgtcaaaagaagtcagaaatctgcattgttgtgaaatctccagattttttacatgttgtcaatttaattaaaatattaaaatcagcccaggggtcaagactgctgacccatgcatggggcctggggggaaacttgtggggctccagcttgtggcttctctgttggcggtgcagctgttgaagattcctacacacaggtgccacaggggaagatggcacaggaaaggagtgtggacctggagaatcaagtaaggagcaggcagcaactgaggcagggccatatgcaactgtggccaggggtcacatatcatactgagcagagttcaccttgcccgagaaccacaaacccaggacaaatagaagggaaacaaaataaaggaaagggagccagcgtgtctcgttcagtgttgggtaagtagtatgaatttggtttgttttcctggctgtctttaaagaacgctgggcggtgctagcctgtatttctgatgagaggaaggggatttaacctgtggttcaagtgcacttatttggatagctcagagtcttcatatggtgttgttgtgcaaagagcactggactagaagttgggagacctggattacaggaatgactggtgttagctgagtgccccactgtgtatcaggtattttgtgcacattttcagtaattctccaaacaaccctgtgaagtagagggcactgtgactctactttttcaaggtcaaggtcacagagttggtcaatgcaaggctgggattggaatgagacttcaaaggccaagtcttttccagtagaccccgctactgcactggcctatgctgagtctctccacatgctccatgttacctgttgtgtgaacttggataggtcatctaccacagaggagcaagaggggaaacttcttcagggtttgcttggtccagtctcaacatgctgtggttctgcagttgagatgcatgttgaaatgcatttcatttgtatgttgactttttttattctaaaggtctttggatgtttaatttcaaacaaagagctagagattggagaggcatcaatctcaaacaggcagcggcaggggtgtttagaatgaacttgacagccctgcaagaaaagatgtgttcttatcatatgtggaagggctttttttttggtaggaaataggtacttggacatgtaaaaatcaggcattccagcatggctgtccccaaggcccccacctggaggcttagactgcagcttctgctgttttcatatctttctccccttttatcctctctgaatgtttccaaacccccaaaggacctgcaactttaaagagaaatattattgatgcagttgaatctatttttagcctgctggggttggtgcacatccaaagcagaagaatttggttttatatctattttatctacatcaacacttctttacctaaaatccattaaaagataacagaaacagagctgacttcagacgacattcaattggttcatattttggggggcaatatgtcatgccccaccttgctgtagctgagacatgcctttaacatttccaaggagccacagaaaaagacatagaaaaccttcgattgcatttagagattagaagaggatttttctcctaaatatggagctgtttccttgactcagcaggtatgtgagatggatatgaaagcaaaagatgttcccttgccatgaagcaagtatttttgagtcatagatcttattgatcagactcattcaattggacatttctcttgtgtgcacacatgttccctctctcctctgtctcctcctgcctcagtaacttgtagagagacttccaaaaagagagcaggtttttagagttgagagttaaaacttctggaatgttgttctagctcctggggttgggcagggaaaggtaatcctcaaatataggtggggcctcagaggaagtttggtgaatctgtcaactagaattttttcttgaaaattctcattgaagtaacctctatcctcaaaggattccaatatacatctagggttgaaaaggaatgaactgatggccttaatcagattgatttaatgagcatagggccagagccacaagagcccagactgggtttagagtagaggttcacacatggctgccagttagaatcacctacaagacatagaaaaaattccagcacctaggtcccccttcagagattcttattcagttggtctgagtgaggtctaggcttccatattttgtaaatcctcccagatgacttcactgtcatttccactctagagctgtgcttcccagactctaatgtacagggaaattacctgggattcttgttaagatgcagattctgaggacctagagaaatggcaagacataccatgttcatggactggaagactcatcctagtaatggtgccagctcacccccagatttctctacagatttaatgtaactccaaccaaaatctaagcaggactgtttgcagatataaacaaaccaatttctaaaatttatgtgaaaaggcaaagcaactagaataggtaaaataattttgaaaaagaagtgtatatttgaagaaatcaccaatcgccctacctgattttaacacttgctataaagctatagtaatcaagacagtgtcatattggcaaagggatagacacatagatcaatggagtagactagagtccaaaaatagacctacaacaaatatggtcaattgctttgatagaggtacaaagacaattcaatggagaaggagtcttttctacaatggtcttggaacaattggacatccaagggcaaatgaaacaaaacaaaacaaaaagctcaacctaaacttcatgtcttatacaaaaattgactcaaagtggatcacagatataagtgtaaaactataaagctttgataaaaacacataggagaaaatctttctgatctgaacttaggtaagttagacatgaccccaaaaagatgattcacaaaagaaaaatggatcacttagacacgtcaaaattagaaactattattctgtgaaagatactattatgagaatgaaaagataagctacataatgggagagaatacttaaaaatcacatatattacagaaggctttatagccaggatatataaagaactctcaaaattcaacaggaagagaacaagctacccaactggaaaatgggcaaaagacttgaatagacacatgatcaaagaggatatttggatggcaaataagctcagaaaaagaacatcagcatctttagccattagggaaatgcaagtgtaagcaatgatgagatgtgaacacacctattataatggctgaaataaaaataccaacaataccaagtagtgatgaggatggggggcaactggaactctcagacattactaatgggaatgcaaaacaatgttgctattcaggaaaacagtttagaagttttcttataaaattaagcatatacttagcatattaccagaaattcaatgtctagatatttaccctagggaaatgaaaacttaagtttacagaaaaaacattcatatacatgtttgtagcatctctattcataattacccaaaactaggaagaatctcagtgggtgaatggctaaaacaactgtgatacatccttaccatgaatacatgcagtagcaaaaaagaatgaactattgataaaagcaacaacttggatgaatctcaacaacattttgctcaattaaaaaagccagcgttaataggttacatattatatcaatttcatttatgttacttccttggataggtaaaactgtagtgacagaggacagattagtggttattagtgggtaggggtgataggtgtgatcataaaggataatgcaagatagtttttggggcagagttgttctgtatcttgattatggtggtggctatacaaattgacacatatactaacattcgtagaactttacaccaaaaataaaaaattaaatttactgtatagtaatttagaaaatgaaacttttgaaaagtgcagattcttattcaagaggtttagcaatggggcctgggactctgcatttcttataagctcctgagtgatgctggggctcttgggaacacaagtggagggggttaggctctacagaggaaacatcgtaacatgcagattcagctcatttcattcctacgctgagagacctttaacggatccatagttcttccaagataaaattcaaatattttatcacttcaaaaaacttaaagtaagctctttcccctgaaatctcccatatccctcagatcataccctacagcagtgtatattctctgctttgtttgtggcctagagtgctctctatccacccattccctggaggatgagtgaccccttagtcactggccagcttgaaaggcaccttcccagggaagccatccccgaccctgccagtccctgacacacccgtgcggaatgagggtgcaccttctaatgcagtatgcatgctattttgctctcatgttctttcacttttcagatgtttctctccctaggaacacaggcttttcaaagacaagatctatgtcttgtaggcccggtgaccagcatcatggcaaatagtgagggttgctgaggagcttacagaatgaagacaaactgactttatagaaatagtgaatgtttcagaagcaggaaagtatcctcttaggaactatggggaaaataatgaaggacattcattgatttccaagaacagaagatgccagggaaggaaaacagcttcctccacaatctgtgctgcccactccatgcaggagatagggttcatccacatttgtaaagaacatgtgtgtgtagagtggacttgtaatgtaagcatcacttccatcaccaccaccatcatatctccccagtatcaccatcatcttcaccattaccactatggaacatcagcaacattgctgtcatcatcactgtcatcaccaacaccaccctcataccatcatcatctcaatctcttaatgttattgcaatttgtgtggtgtaacaaaaataataatgactccaaaaatgaaataataaaaatgttaaaaagcacatgtggccgggcgtggtggctcatgcctgtaatcccagcactttgggaggctgaggtgggcggatcacctaaggtcaggagtttgagaccagcctggtcaacaaggtgaaaccctgtctctaataaagatacaaaaattagctgggcatggtggcaggcacctgtaatctcaactactccaggggctgagacaggagaattacttgaacctgggaggcggaggtggcagtgagctgagatcgtgccattgcactccagcatgggtgacaagacagaaacgtgatctcaaaaatagaaagaaaggaaggaagaaagaaagaaagagaaagagagagagagagaagaaaagaaaaagaaagaaagaaagaacatgcatagtacctgagaatttgcaaagtgcttccttggaattaactccagctgcataaggaggatgcactgaattattcacctcactgcagtctgagttttattcttttctccaagcccttatatattattgtctttggatttcctacatttgtgtggggatctaggctggaattcttctgcccatcttgcaggtagtataactgagaccctgggaggttaagattatagaacttgttagtgaaggatcaaggaggaagatggtttctaagtagggcccaccaaagtgccagagatctccatgagaggtgtgatgagtgggctgaaccatcacagagcacaaagcacaggaaatcggttctcagaactcatttgggaagtcagcggcaagttcacacaccaaggtgaaagcggcactataaaaggatggatggaggtacagtaaagaggaagaggaagaaaagaggaaacaaaacgtggccataaagtgtagcttctgatacatagtgaagggacagaaggtgaatccttgtaaagtggctagcctgtcgggagccacactatcacctgctccaagttacccctcctctgcccccaaccaaagaagattgtgcatgagagttctaccattgattgagagactctctaggatcataacatctggaattcagtcctgctttagccatcgtctatggtagtaagtgatcttgaagaagtcaactaaagcctcctcttcagaaggtccccagacaaagtatctaggttgctgaaggcttgggagtggaggatgcacatgaattgccattgcctgtcttgggttgggttgtggtacttttgaaggagacagtgacaaggtggctttgtttcctagggtggggtgctagagagtgagattgtgatgcttgtcatttggtccaattgctactgctttcagttgagcactggtgaggaaccttagttgattcttctatgtaaatggctcttgcacctcaattttcttggcaattactccccagctgtgcccttcttgctgcataaaacctcaatcaatccttcattaaaatgctacagaaactgaaagcttttcccccttgtttcctaatttttccccgagtggattggatttgttatgactcaaatggaaaaggactagctttgtaagcaggttcagattctagcccggttcctatttatttatagcccaaattatttcaacaactgctgtccagtaaaaactctgtttaatcagaggcaggtaaacgtgccaatttcatctcattgcctaagtagtctcctctgctgtggaggaggaggatgccactctgggtcttgtcccaggtgctgtggggctggggaccaaggcagttctagactggctacccattcaggcctggccactcaggttgtagccacttgtgtcatttggtaggaaaagtgagaagttatgagccagaggtttcaattatggttttgccacttactgattctatgacttataaggttacttagcttcttggggtcagggttcactcatttaaaaatggtgatgttactaactacaaatataaatgagttaatgtaagcctccagtcacagcttggaagacagtgttttctttctctttttttcttttcttttttctttcttttttttgagatggagctttgctctgttacccaagctggagtgcagtggcacgatcttggctcactgcagcctctgcctctggggttcaagagattgtcctgcctcagcctcccaagtagctgagactacaggcacacaccaccatacctggctaatttttgtatttttagtagagacagggttttgctatgttggccaggctggtcttgaactcctgatctcaggtagtccgcccaccttgacctcccaaagtgctgggattacaggtgtgagccactgcgcccggccgcacagtgatttcttaatttatggttcatggagattataaaaattggcattttaattataagtgattgaatgaagtcagacattggagaactgaataaatggacacatttattcaacaaaggttgttgaggatctgctaggtgtcaggcattgtgcaaactggtcgagagaataagatattctctctggcttcatagagtttacatggtcagagagcgaggacaataaacacaaaaacatatcgtcatgcatattgacaagtccattttaaaaagaacagggaactataggagagaagggggcaggagtgggaataaattgtactgggaagcagtcaggggagtttttcttgaggaggcaacatttgagctgagaccagaaaagggagcaggaattaactggacaaagacggggaggagtgtatgtctcactacaaagcaagaaagagctacgcacagtcaaggaaggagaagtgaagccagggagtctgaattggatggccaagccagtgactggcatgaaggaggctggagaggagggcaagagcatgtgggctttgtgtgccagagaaagtattttacatttttgcataggcaccatggaagtgttttaagcaaggaagtaatgtaattctatttactaggactagatgaagttgaattgaataaaaggttactaagggtgcaaatgccatttttatgggaagagcttatgcactcaccctgagggctggcataaggcaggagtggcattgagtgtccttggctgttcctggctttggtccctgctgtgtgctgcagcctcagtggctgcagattctgcccatctaaagccatggactttcccatgaccagggcccattttgcctttgggtctgagaatccccaggagtgggaatccagaagatgtcagctctgtggcctgaactggaattccaactggatcatttcattccactattgattggaagaggaacagtaaagctgtggtgttagctggagtaaactggagttgagaaactcactgtgtatttttcagaaaaaaaaaataataataattcttaacaatctcaaactactctcaatattgtaagtcaccttgacagcacgaggacttgaatggtttgcctggagggctaacgatcttggctctcccaggtgcctgtccgcattgggagacggcgcaagctaagccagctgtgcatctctcctattatatcatggaccaggggaccatagacattttgaaagggaatgtatctgcctctctcacacttcagcctgcttgtgggatggcttggcccagacagcagcaggcactatgtcttttctaaatgttctgcctcttgatataagcaagcggtccgtgaagagatttatcagaggcccttgtgatggatacatgtcttcttataagctgatagtccaggggagactcctaaacaacaaagggaactgaaggcagactggcagcaattctagtgtcctacaaggctgtggcttgtcctgtgagctggacggcggggtctgaggcaggacgtcaggcagggccatgctgagagcatttcacatttattgaaagcctgctgtcctctgggcactgtgttttcctcttgccattccatttatccctcccagtcatgctccgctttatggatggagcagttgaggctcagaggggttacataaagcacccaaagacatatgggcaggaagtgacacaacctggatttgaatgcaaatctttctggctgtttccatattgtctcacagcctatcccagcatcgtgtgtgtgtgtgtgtggggtggggggggtggggggggatagggggtgggggctggtggtatttagggatgccctcttcttaaggatgtgtcctggggctaagtcattgttcttgggggtgcagggaagggacaatggatcggaagggtctcagtttgcctctggcctgtcagtgggccaccctcctctcctctgtgatgcaggggcagtgtggctgccttgccagcctgccctcctccagcctgctgggagcctcgcgtgagacaaccgatctggaagccccttagggaggacacagcgcaggagaggcagctgaggctctaaggacagctgctatcaactgccagcagccactgagggagaccctgggcctggcatggctacaaatgggctcagctccaagggaacagagaattgggccacatttgtctgggctgggtcagaaatggcagttcctgagcccatatcaccagctcccatttgcaaggctgaggaggtgcctgggcttgctgtgtgctgccttgctttcgttcccgctttttaaggcacatatcagcctgggcagctcttgacccacaaggtggactcttctgggccagccacgggcagtggccaccctgtcctgccaggccgcagaaaggccctgggccactcccaactggagccagtgctcctggagagagcagtgacctggaccagcagacctatggatcccctcttgctcctgcactcgcctgctccttgcagtgactcggcagtgggagtgggaggtgtcagagcaattaggcggaaactcctttcgtgcacctctaattttcgagctctctgaatctcattagttcccgggcttttctgctctgccctcctgttctttgcttgcagaaaatccagggggcagccagtcaccctgttgctggcggtgatgatgagaccccaggccagtggcacagaggcctcctgggaggaagtccctgtttgggcgcccagcactgttcagggcctcctctagtcttgttctactttaggccttaccttctcatttctgttgctggagcaaaaggctctgaattcagagttgggaattctcaggcctggtctgagatttgtctgccccaatgatgatgatgatgacgatgacgatcatgataatactacactaatagtagttaagagttaccaattgcctattctgtactaggagcaatttagacctcatcacatgtaattctaacaacatccccgcaagacaagcattatagtcctttcatagatgagaacatctgtgcttagagagattaagtaactttcagactcaaacagctggatggtgactgagctgaggtttgtacccatgtcttgatgactaagcccagctgtgcccaccgggacaccttgacctagtacttctgagagccccagggtcactattcagaggctcccagagctgccagtaccccagatcattgcggctccctcatcctggcagtgaggaggctcaggcctccgtgctagtgccccactccttgattctacccgtccctccctccctgtggcctgcagagattccgactgctgctttgtttcacccagagcacctcttctgggctgagtgctgtggaaagggccaggtaggaaaggagatttaaagtagcttgactcagtttctcccctgagtttccctttggagacccgagaaacacatctgggaagtgaatgggaagatgagaagaagtaagcaaaactgggaagagtgaaggccttggaagtgcagaggatgccggtcgtcccaggtgctccggggagtatttctgtttagagtggcatgtggagggagtgctctcctggtacagcaggcgtccaggcagagtgagactctgctagactcaactctttcttcttctctgaaggaatcagagactgaaacaaggatggcttcatcagtttggccatagcctggaaagactgggaaacccagcagctctctggcccctgggctcacagacgacatagttcttggaagctgtcatccctgcctgtgatgactgacctgcctcttgccaggcttccatccttgcttcaaggcctgctaatcatcagctccactgggagatctttgcaggctgccctggaatcatagctccaggcctttgttctagaacatctgttgcattgtattgtacctattgctttatatatttttcttccttttctccaagacaagaatgtgcactcattcaagcctgggatgggctcttcttatgtgcatattcagttccaagaaatatttaaactatcactagtgtaattcagcatccataatgagtttatactcttgtgtattgaaatcagatgactttcctgtctttgtggttcatattattaatattcttcttatcgctttgctctgcttagttctttttttatacatctttgcctctcacccccattttctgccttggcattcgtttgttctttcagcgaatgtccactgggcacctactgtgtgccaggcactgttctaggtgctggggatacagaaatgaacaggaaaattgattggcttatttatttgaaaaacacagaattagggttgactcagggtgaagcttgatccactggctcaacagtgtcacccccagagctcccatctccgtgggcactcaccctgtgggttaactgggtctttggggcgccatttcctggacatgcctcaagacttccctgaatgagtggttcatctggtaatgaatgaggccacacaggctcccttatacttgtccctggcgtgggagctgccttctaaggtttcataatgagaacatgcttttttaggggagcaggtgtgtggtagactctggactcctacgctgctgtcttctgattattcccagagaactgcacctctccgctctggttgggctgaggctgtttttgtcaccccacaggcctgtgttgtttgttcataaagcagagagacatctgtcatcctcactgagcccgacagatgccacattcaaagacccagcacatgcagcagcagcggtggcagcactgtcattgcggcgctcacacacacataccgacacactcgtttcttcttcctggcggacaaaccttcctgcccctccccgccaacacatgcttccacacctatgagattcaaaatagggtaacagcagaactgcaggcctgaagcacttgctggacagtgaggacacctctgggttgaggggacagggttaaatggggtagaacaggaagaatattcctcctcctgggtgtgaacgagtctcctttgatctctgcaggaagtgccttacccaggccctgttacctttaggagcaagaacttgaggaaatggtgtgggcacatgcacaaaacatggggcttacttttagcatgaaggggaaactgaggatgcccagctcattgtgtaagagagtgaaggtttgaccgagggtggcttctaaagcaaaacttagacagatgacgacagggatgaggtggcaggatccgaagacaaagaagaaccaggcacggattcactcgtacttgtaggaggaccttggacatgttttatgtaatacagaacatttcctcttttaggattgtaagtaatatcatggtagatgttactggaaattttatcactcccaccctgtgggtcttagcaggaatcatcctgaatggtgtttgtggacttgttttggagaagtctgtgttgagggcaggggtggtaggactttgtgttcaacttggcaggctcctggagggagagagtggtctgggacaggcgttagagggtcaggccctctgggcttaaaagagaaaaaggaagaggggaatgtcttggagaaggaggggccaatcacttgttaggtcctaggcagtgtcttggtgccatgtattagaagggaggtggagggagtggggaggtatcagcctgtagataacatcctgttctaatgggtgggtgtgagaaggtgggggagatgctttgagacatatttaataatatctactacagataagtcagtgaatcccactctttaccatgtaggcttatcaaagaccactagcagaaaaagactggtctaatcctgagagtttccttggaggacttcctcttagtgtagccccacctaaggctctgggatgttggagaacagccggagagagaggaccagttctgtggctctcagctaggttgcaggagtcttgggggtgggacggaggattctcagctgattttccctgcttttccttaacatcccccactgcttgaaggagctgttccacttgcatctttttcttatattgtgctttggctcaaatatttatctggaaaaagtcctcaagaactaaaacctttctttgtatcttgaatcagatcatttgcaagttccctctgactgtaagctgattttgtgacttggtgttcccgagacccccagtccacttcatctcatctttgatttttaagccattctgtctttcttaagctgacatttgaattcctaggtggttctttctgcatttcaccagcttacagttgtgactcatcctcctcatgttgttttaagtcatgaagagaatctgaatccagcaggaaaactgagagccatcttcataacagtgaaagtttctggaatctataaaacatcaatttgtatgtagaaactgaagtttaagaaagacaagcttttctcttaatttaaattattgcgtctcatgggaaatttaattttttaaataaatcacatattccaatgaagcagaaagctttgctagatacacagtgaagatgtttgctttaaaaattgttctttattcagctagagaggaaccaggggaatacaggaagataaaaagtgctgaatggaatatacaagacaaggttttgaaatcaaggctaaattaatcatctctccctttcagtgggctatatctaagcagaggctggcagatactctctgactgtcagatttgactatgttattctctaccagaggatgctaccagaatgactgtcccagggtccatgggtgccaggatctgttaactgatggcaatcttcacctgaggaactgcatgtatcttcagggatctcttgcatgcaagtgagacaactatggttcaagctgcttaagaaccaaaaaaatggggatgggaatttgatggcttgggtaactgaaaagcttagggttaggcttctcttcaggcttagctgattccaggcaatcaaatgatgttcttcagtctcttgctgtcactggttcactcatttctttttccatctcttacctctgctttcttctgtgttggttttatacttgggcagccttcttttatgtggatttccgtaacagaatcaaatgcatatcatattggcttcttacctttggctttcaatagaaagatagattctcttttatatatagacatacagtagttccagcaaaagtcctagaactcactctcattggatcaggttggttggcatgttgcttctgaaccaatcaccacagccaggaagataggtctcatagtcttactgagcaaacctgggtggatatcactcctggagatggaaggtggaggtgggcgcattcttaaaacagagggattgagagtggggaatagggcataccagaaggggcaatgaatgctagtcaggtaaagataatagctatccactatgatatggtttggttgggtagacttgagggaccagacctggggtgacccatgtttgcccagctgatcccattgggtgatttcttcctgtttgatttcctgcaaggtacctcagttgttggcatgattctcctgccatcttgctcctggatgttgaaaggccacacggtgtctaatttaccaacacagacctgatctagaaggcaaagacaagttctatgcccacacttttccaactgtagagttaagaagttatttctatcctccaggcttaatttttggctatcaatattgagctaaagactattgaagatttacaaaattatgtatcaatttaattttactataattaaacacattttagtgaaattcctgtagcttccgttattgatatttttcacaacaatcctctgacatatacaattagccctattttacaggagagaaaacagggtcagaatggtagagaacttgttaaaggccatgcaacctggagaatccagcatctatgtgcttgtgctgggtttgatgcatttagggatgaataagacattctctgcccttgagctgtatgtaattgctctgtgtttatagttacataaaagaatgagtaatatgcctctatggaagtaaaacagaaggaagtgattaattttacgtaaatgtagtctaggagacagaagggacattagagatgggtcttgatgagtgagtaggagtttcccacgtggatattgtgtacagggggtcgttttttcactgagtaatgcgtgagttttctatgagatggagctgccagtttcaggaaatgtaatgtcacccttgactctgccttctccttttaccagaaggatggccacagagatctacattagtattagttaggtgctttcatttgcaaagactagaactcctaacacaaataggcttaaataataaagggcatgtattgtcttatctaattgaaaagcacagaattagggctgacttaaggccaaacttgatctgttggctcaacaatatcaccaaggatctggcttctttccatctctccgttctgtcttatgctatctttcatatcctttggtgtctttatcaaaggctggcaccttttaggccctaatatgactgaaggagctcctggggctagatgcttccttcatcatgcccaacaggaaggaaatggcatcgtttccaggcactttcagcaagacctgagagtcactctgattggactggcttaggtcacatgcccatccctgaacccatcactgctgccacggaacagagaacattgataaagttgatttccctgaagccacatggatccccaaatggaattttgcagactgatggaaggaggaagtggacaacggatgctatattagtccgttttcacactgctgataaagacatacctgagactgtgaagaaaaagaggttaaattggacttacagttccacatggctggggaggcctcagaatcacagtgggaggtgaaaggcacttctttacctgacagcagcaagataaaaatgaggaggatgcaaaagtggaaacccctgataaaaccatcagatctcatgagatttattcgctaccacgagaacagtatgggggaaaccaccccgtgattcagattatctcccacggaatccctcccacaatacgtgggaattatgggaatacaattcaagatgagatttgggtggggacacagagccaaaccatatcaaatgctcagaaggcatatgttttggtaaggcatcaaagaaatgtttaccagagcactgaagtttccatagtctctcttttttgggcagtaaaggttctatatagctccaagacataatctttgatgctcagtctatgacaactcaaattctaggcctttccttggataattcagccactgaactaccttttgcttccctctgtagtctcttcttagttagtactctggacaaacttgctttgactttgtccaaagacacccattctttattagtatatgacgaattttgtggacagagaagagtgctatgggcatgatggcatacttaccacacagaatgatctagaactttgtagcaactaatgtcctaggccttttccagagctgctttcttcaaatggggcaacagacgtgatgccgcattttctaaagctcttcccaacctccaaaacagcttcttttctttctgctgaggaagctaaatttactttcagtcctcaaatggtgaaaaaaaggggagcctccccagatgtctcacactgataagaggaagaaatatccaaagccattagccagtggtgacaaacagtgtgtgaattgtaacggacgcagggtggctgaagaaaagactgagtggttggagacaggcaggcaggcctgagtttcaaatccttaccctgtcactttcagcactttgggatgctgaggcaggcagatcacgaggtcaagagatcgagaccatcgtgccatcatggccaacatggtgaaaccctgtctctactaaaaatacaaaaattagctgggtgtggtggcacgcatctgtagtcccagctacttgggaggctgaggcaggagaatcgcttgaacccaggaggcggaggttgcagttagccgagattgcaccactcactgaactccagcctgggtgacagaacaagactccatccccacccctccacccccaccacccccccccccaaaaaaagaggcaggatgccatggggttgaagaaaacaggccctgtagccaggctgcctgagtctgaatcctggctctactgttcaccaactgtgcctgcgttcatgtcccagctcttccattgactaagcctggatcaagaaataatccctgagttctaatctgtcattcaggtaattgcgttcttatgtttccttttgtcatttggccttccaacttagttgggatgatggtggctgtcactttatctctttggcctcaattgtttcatctgtaaaatattgatacaagtaatgtccacattataggttgttgtaaggattaatcctcatttaactcatttacaaattttatgcattatatatgtatatattatatataccttcatatatatggaaaacacttgtaacagcatctagtaagcacgaatgatgtggatagatagacatatcttatagggttgctgtaagccctagagactttgcatatatattgtctggcaatagcagacactgaataaatcttagctattattaataattattatgttgattgaactgtttaataataatgtgattcatctaaatagagctttatagtttctggagttcttgctgccaatatgatccttcttgagccctacaaccactcagtgatggggctcctattcctctgtccagtggctctcagggaagggttggatgcctctccagggtctcctggccaggtggtcattagcaggaccagggtgtgaatcatagtgaggagcttcccagtccagggcttgttccacatcctctcttcccccattctaaaggcctcccagccatttgtcacagcctcatttgaaatgcctgtgcttctcatctgtaatatcctgattgtcccattaatctcctttaagcttcatgaaaaatacaaggggctggatcaggaaatagccaccaagttctaattttgcattcaggggattgtcttccatggacgtgaagagactgatgtttcccatttggcctttgcctttccaactaagtcggggagagctgtcattttctgaattatcaaccagtttacaaggtggcatctatattttgcctctaatgtgtctgtacttttgttgcttctctatcttcatatcatcctctccctagtagatgttctacagtactgcccagagggagtggtaagaaatgtcttttgataaaaccttaaaagcttaaaacttccagtcactttcttttgcatattccttagaccctggccataggccagtgctcactacagaaggagcagtgtttgttttgttaacacacacacacaaacacacacacacacacacacacacacaccctgtactgcaagatcctaaattttagacttagttcactgttttatatggtagccactagacacgagtggttgtttaagtttaaatgaaattacaggttcagtttctctttgcattagccaccttttgagtactcaatagccatgtgtggttagtggctaccatattgggcagcacagatagagaacatttccatcaatcacaaagtcatatgggacaacatttaccataaaggggaaagggaacgggaatgggcacatgagtgtagtgttcagttaagtagcatcacgggacaacagatgtgaagtagtcctcttaactctctgcatgtatttcctctgtgatttccaaaggaccactaaccaggagaaataagaaactgttgttttctgacccaacaccagcatgcaatgaaagtaggatatttttcattctatagagaaccgtcaatgtgtattttgttatctgatttgaaccctgcacgcggacagcacatttcacgtgttttagcccatttgtggctggcacaggtgtggccagaaagccagcataggatcttgtttgtgtttaagagagaagttcagggagactattcaggcacattgtctggcaagtctagcactggtcaaaccctcataaatattcctgtccaatctgaacttgaaatgttcttgttgtggacacctttggtgagccagtctacttgaggacaatccagtctactagtttagcttcaaaaagcatgcactagaaacaattagaagaacagggttgcttttaaagctatcaggatggtgtttgctgttgttttgttgttaaatatcaatgggttactcaatggtaatagatctaaagagatgaacattgttacatgaatattgcaagaaatttgtggatctcttggggaccctccagacctagttttgagaatgactcatataaacaatttgcagagtctaattcatatactcagactagggttctgaattcttttccccctgggaggaaggaaaaacagaggataacattggttatctggggtaataagaaagcaaggggcagactacagctgccctaagatctgagatctgagtgacagagcctagttcagggaggggctgacatgctgctgaaatgggcttatccagccacactcagagctctagtgagtatcagggtcattgtgttctaaatcatctgtggccagcttaccaaataggctggagtctggcagagaatatctatagaattttccacaaatcagaaattctggtttccagaaggataaacttccccaaatatcctggtggtcttgagttaattgtggcttcctgggagtttctgtcgttggtaagggtcacattttcattgtcccttgacctttagtcttctcagagttgactggtaacattaaaatgagcatgtcttcacttctgtcacttacaaagctcttaaaaaatttataatactttaaacatatcacagtaataaaagcaatcgtatctctttacattgttgcagtcttttggataaagtcccctgaaagcattgtcctggtggttttcaaacttttttctttgatctttcagaatctttgttcaaatgacatcttggctagactccaacatatagcacagataaaaatggagttgggactgcagggagagaaagggtggagcccagctcactggacctctgcctccacccccaaaccaccctctagcctttgagtcaaccactgagtcaccggtgagcaatccctgtggttgcccagagcatcatcccactaagtcctcataatcaccaggcatgattgtgaggtcatcacagtgaattggtgcacccctggaggtaggaaggcagctgaagaggggagagagacaccctccccacccccatatgaggatggtctgtgatgatatgcatgcaggggaagggacttatccaaggtccctgatagatagggactggaattttggcagtgtcttttctagagtagaacaaatttatcagttgaatttgctgtagttctctgaaggtttctttggccacattagaatttttgagccctggcatccaagtaggccaacttcaaaatggctgtgtgctccactcagagattctgctgtgaagactggcaggagattttttagcctattctgaactccaactgttccagttcctcttgctttccagaggtgtgagcacctggaagcccctgctctggtctacaccccaggctcaagattcatcctgctcactcagccactcatgctgtcaccagtgataaaactgtaagtgtcagcagttgcatttgattcttgcacaagaaatagttaccctctaaagacttgttcattcttgtgcctgtaaagtgtggtgtgccctatgcatcagtattcttgcctatgaaatgggcatgtaggctgggcacagtggatcatgcttataatcccagcactttgggaggccgtggctggtggatcacctgaggtgaggagtttgtgactggcctggccaacatggtgaaaccccatctctattaaaaatacaaaaattagccgggtgtggtggcaggcgcctgtagtcccagctactcgggaggctgaagcaggagaatcgcttgagcctgggaggcagaggttgcggtgagccaagccgagatcgtaccactatactccaggctgggtgacagagcgagactctgtctcaaaaaataaaagaagaaatgggcatataaatagatctacataagactcactggaagtttagagctctttaaaaaaatggacaacaaaaagtttttccaaataaatgttgattctgggcctggaaagtttgagtggctggcttctcagagacagttactaccatccatgctctttaaagttccattgctcttattctaaccttgaaatcaaagaaaccaaagctgtggtttcttgtctgaccttggctaatgattttctgattgactctacatgcaaaagaactgctgataagtttcttataggggagaaaagatgatggggagaaaaggaactgagttcatttcctaacctcagtttccctgcttactcacccagtgggttgggagccacttgctgggtctgagtttccataatcaccatagaaatggaagtaatattatccttttgcccagtcgatgggaggatggaggaatgtcttagtctgtttggcctgctgtaacaagataccataaacttggggggctgataagcacatttatttctcacagttctggaggctggaaagttcaaggtcaagacaccagcagatttggtgtctggtgagggcccgctgtctggttcatagatggcactttcttgctgtgtcctcacatggtggaaggggcaaggcagctctctggaggctcttttataagggcatgaatctcattcatgagagctctgtctccatgacgttatcacctcccaaaggcttcatctcttaatataattacattggtgatgaggtttcaacgtatgaattgggggtgggcaggcataaacattcagagcatagcaaggagaattcagggattgcattaagaaagtaagttgctgagcaaagggactcatcttcaaagtccaatacaatctttataatcttacaaaaagctttcctggttttagaattagctccaaggaatttggcactagattttagatttgctcagagaaagagtgtgagagagagagggatgtggcttttgtgaggaattccagcaccttcctttgcaaagatatgccctaaagaacagtggcggcctatcctcaggacagaagcacttaattttgtctaattgtgtcaatttctaggagtcattgggaaattcagcagctaatgaagatggccctgttctgtcaggtccctactggaatatttaaaattctgtttttcatacttatcagctaaaagaattacagaaatatatttctggatcctgtggggaataagagcagaaatatacaaagcttcttctttcaagacggatcccagcagcccaagctaatgtcacagttgtgttaaagactattgattccagcaggttctgggctgggtctcagcttcccaggactgttccaggctgacctcctttccctggttccatctttttttgggacttctgtgggccttcattcagcatgtggcttgcgggtgtccaggtctgcaggcatacacacctctcctgatctgaatcagagaacaaaagataaaggatcgaggacaatggcctcttcacttttgctttctctcttctttgggttttactttgtgtttccaacagccaatggaaggctgttctatttagggtaaatgactcagacttggtacatctcgaatcgtatgtcagagcacactgttgcccctcaaagctcaggaaaggctgcatactctatctccctcttgatggtttcctcgtatttacaagttaaagaccatagatgtcctgtagtaaaggggttagcttgcctctgtttatcccggtgattctagtgaaactaaaatgcttgtttctatggggcacagtccagatgtgttgttcacttggattgaccaatcctttcaataaagttttgatgcaaccatgtgaatcccaagttttcagcacttagttttgtgaccttgagcaagtcacctaatcattacatgcctcagtttcctcatctgtaaaaggggataataaaaagcatctacttcacagggttgcattgaggattaagtgctttaattaaggttttagtacagtttctgaaatataatgtattctatatatggtagctattattatgttagtatccattattatttgctggaatcttttaacactgtgctgagtgttggtactgtcttcttatcatgtcatagagcatggggtagtataagaatcctaccttaggtcaaaggtcacaaagccctattgttttattcccaatagtcttacagggaagatgcagttgtccttgtcttatggaggaaggaggtgaagcacacccgagcggtaaagaggcccctggtcacacagcccatacaggagtcaaaccctggcctctggctgcaagcctgccatccccaagcgtctctctaaagcttcttgtcaaccagcctcagacaggggcccacagacacgaacctcatctcagcgttggtaggaggcaccttccacttggattctcttcatgtggttaagagagtcctgagttccaatcctaagttcactcgtctctacctccttgcctttgtgcaggttacttaacttttctgaccatcagtcttctctgttgtaacatagggatggtaacacccatttcttatgcatgcagtgatgcttaatgacataatgtaggtggggttcatgcacaaggcctggtatatgatgagtgctggtaaatcttagctcccaatgacactgtatcaggctctgtgctagggtgctttacgaaaatgatctcatgtaatcctcacaacacatcaggatattggtactcttcattttacagatggggaaactgaggctctgtgggattaagggactcacccaaggtcataaagccagattgtgacattgagattcaaatcttggcaaccttactttctggaaacactttcccccttcctcttctttagacccacatgcaggctgcttgcagactctgtgcttggccatgtttcttggtcagcagggcagtcgggcaatgggcattttaatcatgtttatgctggacagggctgtcccttgggcttgaggacaatgttcttgaaccagaagaatatggcagaagtataatgccatttcaccaggacagatgcatcaaattccatcttgggtctggtaattctgccacagatggtggcccattgatatgtgcatgcttggctggggtgagagtctgtgccaatgtcacaggacacagcaaccccaatgagtctgtttacttatttaacagtcaaggtgaccagaagagacactttccaacaggacacaatgaggaggtacccagcaagtcttctagctgattgggggaagaaacccagtgtattacaggaaaatgagagagtgcatttgaatttgtttctaatctgaattttccatataaactctagttagcagtttcaaaactgtggacgcacttcagcctaagggacaaaaacaaaacaaatgacccaaggtaccagctgcaagatgctggaataggagggagggagggaaggccagtgagagggcaagattattaatatgcttttcttactaaattggctttcagaatcaaggggaagaaccaaggtgggttgttaagggagtactgatttagatgtgctgagcagttgaaatgtttttgtttctcaaacatgaaagcacttggctttgcatgactgggttttaaattgctcagcaaagcatcacttggggctaacctgagtctgtgaagttccacaattcaggaatgatggttactgcagcactcttgtgtttcaaggttcgtcatgaagactagcatagattccactgttcaattaaagcaacgtttaccatgatattcctattttccatgatgcagggtcctgggaagcatctctttcaggaagggagtatgtattcaaggtcagtcagtatatgaatgtgtctgagacttggatggctcaaggggatagagctaggtgttatctggcagtcgcaaaagtgagagatgatgacaaggccaaggtaggtaggagaatggggatccctcattcatttatcccatcattatttattgagcaccaactgtgtcccaggcattgttcaaggttcaagcacaaagccgtgttcaatgggttcaggtagaaacatgcacagttacatcacaacagagtaaaccatgggaactgcatggtgcagagtagggggtatttgcatggcagttgaagacctgtgtcggacgctgatgcttctataataacccaacttggttcctctccacttttagagccaattaattaggaaaaacactttcttccttccctctctgtcattctatgttggcatttgtcccccttgggttgatgggcagacacaggtatgaaacccataacttcatctctctgggattcagtttctgggcagagtgggcaagggaggccagggtcttctagactcactaagtcagaagcatctcctcctgatctttggtttaatttttcttttgaaggtactcagtccatgatttcagattagggaggcaccacctggcaaagggggagcctgacaatgcagggcagttctaagtaccaggcttgggaccgattctatggagatatggtagatgggactaccctcaactgaataatgtgtgaagagaatttaagaccatgcctgatacatagagggtccagtgaaagttgaaggcaaataaccctggtaaagaaggcaggaaacacaaggaagccattcatttatttattattcattcaatcaacaaatatttcttaaatatttataccaacaaagcatggaacctctagccaaactctctggtttcaaatcctggctgttttacaatatctgtataaccttgagcaagttacttaattattctctgtgcctccatttcttcatttgtaacatgggaataatcaaaaagaataaatgaagattgttatgaagactaacacatgattgttattattatctttttgttcatttatttagctgtgtccttagtctgttgcttgattggtgtggtgttggggatgtggccaacggagacaggaaaggtctccgtctttacccaccttatattacaatagaagagtcagattataaaaaaataataaatcaataaataatactttaaggtagtgatgagtgatgcaggaaacaagagaagatgattgtggagtgagtgattactacgggtgaggtccaatgatagagaggactagtgaagagggaagacagtcagtctacacaaagatcatcctgttgaaaaatatgaaatatgcaagtctttggaatttacccaaaaaaaaaaatagagaaagcatttcttgagtttccaagagaggcaagcaggatgagccaccaaaaataagtacggttaaataaagattgattctgggaccaaataagcttcaagataattatttctcatggtagtgaatcagtatgtctcacaaatgcattcatcttttcatgttttcagtacccaaggtccttgatggatggattaatcctccttttcaccttgcttccttcacctgatccctcacctctcaatgaattgaaattaaggaccgttcatttggaaaaacctattaactccctgcttgtcgatggcttactttctactcagcctggctgggttccacctcttagctcgtgagccctcacgcaactctgctgtctccattagtgtcccttgtgggctggtggccgaggcagttaggcttatgaatattccagttgctcctgtaaatttccagcatccactgttaggcaggacatgaggcactaagggatgtgcatcacttctgggctggggcaggggatgcctgtgtgtggtggtgcagttgctgtcttccctgatggcactgaagagactgtggcttccagggttgcagtgcaagatggcggagcttctgatgcctaggcccatgagtgggcaggtggagcagagcccaggctgcctttgtcttcataggtctctaacttcttgacttctcaatagcctcaatgactggttccttcctgtatttggtaggtgattgaaaacctcttaacacatgaattattcagtcttggctaggccttctcctaaacagttgtctctggttcttaaagttaccttttcctcctctctaaaataacttacttaccttttcctgccacggacactatgacctcttggttttattttcttgattgtatttggcattctctgaaattgtcttatttgtacatttatatgggatttgtgtctcctcgctagaatataactcttatctatttatactccactgtatcctcagtgcctacagcagtatctggttgaaaggggtgcctgataaaaatgtgaatgaaatgaatgccaacagccaggaaggcacctcatccccctcccctctgccaccccctttatcagggctgggctgtgtcagctcattgaggcagtagggagtatggttaggatgatggactgcccgggctcaaacacaacttcccacctgtgtgatcttagataaattcacctctctgtgcctcaatttctttatctatacaatcaggacaatggcaatacctatcacatggattgtttttcagtttaaatgagttaatatacataaagtcctcagaaaattatctgattcatagtaggggccatggaggtattaccattgtcaacagttactggggaagcaaagggcctgtcctctctctggtaaccccccgacccccttcagtctcttgagaacccggcctcaatgctcacctggggtcccctgggatccattcagcaagaaggttcagccacaccaagccctgttccttaagcccaggagacataaatccacaaagcctacaggagagatccctgaggaaagtggctattctggatggggccagaaggttctttctcaaggtcaaagctctcggagacctgatgaggccctgcccctcaagcttctgtcctttccacagccctgcagcattatttccataatgttattaaaaaccaatgtgtgctggccagatgagtgacacttcccagtgatggggctcggctctgctcctccaggcatggagaacttgttcaattatgtgccaccccgtgatgggcccaatcacagtacacacattagcttctgattatacccttgttgagtttctcttgacaggaaggaaatgaatttacctcgtgtcacctctgtagtttgcaagcaggcatggcttctgataatagcacctttcatgttttgtaagaccaaggagaagcattcgtgtggtggccagtccttggtgaccctttgtctcagcctggaggtgagcttgagctgattcttcatgggagtgtttactcctggggcttgtaggaatctggctgggggttgggtggtcagctgtcccataagattgtgggccttggccactgcagcatgcacatccctgaatccacactcttatggtatcgaggccttgggcaaatgactgaatttcccttgaccttcccttccacctgtaaaatggggacaatgatagtagttatctcacagggtaggcgtcagatttaatgagctaatagatgcaaagcccttgcatgtgcctggcatataataaatgctacattgtgtttttatcattaaaattatcttaatattattttgctgttgctgttattattgctgttgttattgcttagattggaacatgtctttgctatttataactgtgtgaccttgaacatatcacttagcccccatgtgccatgacatttgtaaaatggggaaagaggagtctgttccttggtgcagctgcaaggatgtcagtaggttggcacaggaaaggcctttgaagcagcatcagtgcagggcaagtgttgtgggttattattggtgacttgctcccctcaccagaggggtcttttgggtgctgtggagccagaggggtctgtccatggtgggttaggattatgcacttaggtcttgctttccatttgggacagtaagcatctgagagaagagtttgtccctgactataccaaattccaagttctgccaaggaatcctggggtaggccagaaagggaggcaggaatggagccagtggtggacccagcgtttccttccaaagcttttagactcagctgctaaagccagtcatgaagtggacgtgattcctgaggcagggcagcaggcccctctctcactacccccttcaccagccccaaccttcagcaacttttcctggcaggagaccacatcaccatcccctccccttcccatcacaggcatttcagaacacaaggggatctgggggacccacgtctaaggaactgtgactgagagcctgggaagggctttctcttgacctgggagagggaaaattaggcaaattgctgtgtttctccactgtaaacctgaatgggaatgagggaggagggagaaaaagccagacaaaaatggagacacatgcagagagatggagaaacagagaaaggagaaggaaagagctacagagataaggaaatgagaaaacactgagaaataattgggaaatgagacagacaagctcatagaaggacttagacccagaaagggaaagtggaaaattatcttgacagctaacacgtattgagaagacagtatgtgccaggcactgagattagtgtgtgatatatctcatttaatctttgcaacaattctatgagataagtgctgttgtcaacttcattctacagtgaaaacaacggacatacagaacggtgaggtgtctaagatcacacagcttttgtggaggagttaggactagaatccaggtcaatttgagtgcaaagcccatgtgcttaaccccctgcagagaggccatgaccctgggacctaaagcatggcagagcatctctgagtctccctgcactctggacattgagaagcactagtcattctgttttgtagtacagatgtgtttataaagagactccagggaagtcagatgggtaaggattatgcctgtcactcttttttttttttttggcattttttaaattatactttaagttctagggtacatgtgcacaacatgcaggtttgttacatatgtatacatgtgccgtgttggtgtgctgcacccattaactcatcatttacattaggtatatctcctaatgctatccctgccccctccccccgaccccacgacaggccccagtgtgtgatgttccctttcctgtgtccaagtgttctcattgttcaattcccacctatgagtgagaacatgcagtgtttggtttttgtccttgcgatagtttgctgagaatgacggtttccagcttcatccatgtccctacaaaggacatgaactcatcctttttttatggctgcatagtgttccatggtgtatatgtgcacattttcttaatccagtctatcattgatggacgtttgggttggttccaagtccgtgctattgtgattagtgccacaataaacatacatgtgcatgtgtcttaatagcagcataatttataatcctttgggtatatatacagtaatgggatggctgggtcaaatggtatttctagttctagatgcttgaagaattgccacactgtcttccacaatggttgaactagtttacagtcccaccaacagtgtaaaagtgttcctatttctccacatcctctccagcacctgttgtttcctgacttttgaatgatcaccattctaactggtgtgagatggtatctcattgtggttttgatttgcatttctctgatggccagtgatgatgagcattttttcatgtgtctgtgcctgtcactcttgacttctgtgttagttaggattccttgggcttcatgtaacagagagaaaagcagtttttcctacaagtagaagtctagatgtaggggtttctggcactagtgctgctgctacatcatgtcaagatagtgtctgtaggatgtcaggattcccttggcttttcactcatggctgcaagagagatggagagcttcagactttgggtccatttcaaggtagaaagaaaagggggaagggcaatatcaggttaagctgttccctcctgctttttatcagacatcttcccctgcagaatatgtggcgtggccacctatagctgcaagggaggctggaaggtgattattcagctttccatcttcgaggacaggcaaggttggactccaccttgggtgagccaaactgcagtgtcagccaccttccaacaaaccagcctaagcccaaacccaccagtaaccctcccctagtggagggaaacatttagttctcttgggagttgcaggcaggtctttgacttgaggcaccattctgagtcaagctgggtggtggggaggtggggtgaggcaggagtgcctagctctgcttccccatggtgttgctgggggtagatacaaacacagtcacatctgctatgtctggaaaaccaagactggagtctctcagctctccagtgcctgctttccctgtagccaattgcaaggctgacatcccaggaaaggcagcagattagatgagcacaggagcagagaggctgggaaggcggtggaggagggagaaatgtgggtttggcagaattttctaaaatatcactttattgatttggaagagacacaagagaggaaatataagagacaagtgataagaggctcagctgagatgggcatggaagagcctgccttttttttttcctttattgcatacctatggagcttttctaagcattaaaaaaacacttccttaccccctccccatgagattttaataccacagatacactgtatatctgtgtgtgtactctgtatgtatctgtgtttatacataaaggttgttttttcacttttcaatgtctgccttcctggaggagactttgcccccattgagaatacatgcatgagacacatctctagagacgcatctgggcttactgtgggaggagaagagctggtcccactttgtcaaactgtcttgtagacaaagggaattgagaagagtcttacatttcttgagcacctgttaggtatttggcaccaagacaggggctttagatctgacaactcacctgatgcccaatggcagttctgagtggtcagagcaggggcctcatttcacaaatgacatcatcaagatttaggggttcctccctcctttgaagagatccaacctgcccagatgaacaagctagcactattctgatgacagggcatggttgagtgtcagatgggttcaaagctcgtaggatgagcacagaataggctggagtctgtagtggtcctccctggaggagatggggtgtgaactgagctctgcaggacagacagatgcagagatgagaaggggaggcagcacctgctggagaagagcaggagcagaggcttagggtctgtaagggcctctggctgcaggggaggattttcgctgagagctgagagagatggaggcagagccatcccgggcaaagagaaaaagccccaccctggcatgtttattcctcagtctctggttgtgatgtagtaattgagccagggatccaacccagctatacttagcaccatttccagaaggcatgagggcgggagatgggtatataaaaggcaggagtctggggctcctcactcagaggcttctgaaacctgagtggcattttcagtgtatccctgtggaggaaatctccgaaagaaggtagctgagtctgtgaccaaagagaggcttgagtcctgtttccttttcactctcaagagccttcaggctcactcaccccttcccttacagatactttgctggagctcctcctgacatgattgtattagtaaagagaggcgccaataacaaatggcccccaaatctcagtcggattctgcaacaaaggtgtatttcttgcttgtccttcatgttctgtataggttgtactgaaacccctgcttctggagccattttcccccaagattcttcattttaacatgtccttccatttgccatactgcaggaagaaaacatggagaactgcacagctcctaaagtttctgccaaaatgggacatatgccacttctgctgatgtttcattggccagtgtaggacccatggcttagcctaacttcagagggtgcagggtaatgtaatcctgctgcatgcctaggatgtgaagagcaggaaatatttgtcaacagcattaaacatgaccacagtgattataataaatgatttttcaatatccagttgaaatgatttttctgtttcttttctttttttgacacagagtctcactctgtcacccaggctggagtgcagtggtgcaatcttggctcactacaacctccgcctctcgggctcaagcgagtctcctgcctcaacctcccgagtagctgggatttcaggtgtgcagcaccacacccagctaatttttgtattttttagtagagaaggggtttcactatgttgcccatgcaggtctggaactcgacctcaaatgacccgcctgccttagccttggcattgggcctctcaaagtgctgggattacaggcatgagccaccatgcccggcctagtgtttcttcttcctctgtaatgctctgatggtctctgcatcagtacttatattatgcttggtaaatatttgtcttcccatctaaagtcaaaacattagggacaagatcctgttgaatgagggaactacaaatacttattgaggatccactcactgtataccaggcacagtgctaggtacacagagcaaactcccagtcctacaaggtggtggatctaatgacgtgacagatgacttgtctccgagttctggaacatcctgagcatgttctcatcccagcactgactagtccaactacttgttgattctctaagttagaattgggagatgtgggaagcttccagaaagaggtgacctgtgacctagcacaggctctacccacagcgggagcacaatgcattcttgaccttcacaatgcttttgacaatggttcattcaccctccatcacacttgttcctttcagtagggcagatattgttagtcccattttacagatgggaaaacagattctaagaggtccatcagcctggtctgcttagttctttgaggatgagtattcatctctctggctgtgtcagctgagctggacctgccgaattcaatcttcccatcactcagctcccaatgccatcagtcaagtgttatcaaattggtggagcttaaaaatgacagccatttgaaattgagtagaatttggtattattaaaatagcattctaaattttaatcttgtgcatcgactttttaatagcttctactttcactaaaaattgtgggccatgctcacagacattcaatttaaatactgtcaggcaagactgatttctcttccaacattgccagatttttcttttttttttctttctttgcattcatcttcttttttttttttaagcattgagttaatttttcactacttggaaatttcacagtgtatgaaacctcagaaaaagaacatatctttgtgtacagctcttttattctttgtcttctgttctgtagccttctttctagcctatctgttggttagggcaggatcctctgtggaagctaggtaatggttaattttctgggacaccttttctcatcacttcttccttgtcatgatgccaaacaagtctcgtagtcaatatcagcaccctcccctgcatgtgtcctttcaacacttaatctatctagcacttaaaaaaatatctgggagatgctggccatctatgaaggaggtttctcccttgctgctgtgtccattactatttttttcccaacttccccctgcatctgctgtatgcattactattttttcccaacctgtccctgcatcttacctagttttcttcatcctctcattcccatcccagtttctcaccttgaaccaagattggtggagtggaaatggagggcaaggttgatgaagaggagggacaaggggtgatatgaagtgaggagcatgggtcttggagtcagacctgaccgggcttgagtttcttcctttcccagttgctaactgtgtgaccctggaaaagttgcttaacctcctagagccttggttttctcacttgcaaaatgaggttagtggtacctgtcacacagggttatcatatggatccaacgagaaagggtacataaagtgatgctgagtgctgtggttaatggcatcatagccaactggccactctttcctctcctccactctgcaatttctgcaccccagcccagcagttctcaggtctagttacacattagaatcacctaggagcctttaaaaaaggtgcaaacatccctaggcctcactctagaccaattaaatcagaatctgggagtgtatacttgtggcatctttacttttaaaattttctctaggtgagtctgatggatgctagggttgagaacaactctaagtccccagggttgcctaaagtccaaaaacacttttcttttaagatcagaggaatcttattttagtgcttgtgggcagatctctcattagtgatggaatgggatttaaccttccttggctgtgcctaggagaaagagaagaagaggcagtgtggaacagggactctcagtgggtaagcccaaggtttccctttgttttcatcttgggacacctatttacccctgcaactataccgcttgtgcttccataaggatgaggacgggaggaggaggaagatggggaaggaaagagcaggaaaaggagggaaggggagaggcttttctcatgggaccttctccacactcctgtgcctgctgagatgtgtcccctcctctgtactctgaaaatcctttagtctaaccctgagggtccaatatgtggccagtagccacatatggctgttagacacttgaatatggctagcctgaattgagatgtgctgtgtcatacatgttccaaaactaagtaagaaaaataatctcattaataaaactttaaaaatattggatacatgttgaaattataatatattacatatattgggttatgcaaaatagtatcaaaattaactttacttgtttatttttcattttttaatatgagtaatagacaaatttaaattagctatatagctctcattattatatttctgtcagacagaactggttcaacccgttgtttgacactgagtgtatgtttcatgtgtaaatatgtctcaacgcttgcattagatgggcagtttgagaacagagacctcagcatcccattcattttctggcccccaaacacctattttcaaaatgccttgtactcagcaggcagttggtaaatgttttctgtaattgtgaatgataacagtgatggtagtgatgattgtggtaatgaagaagatgatgtaataaagctcaaatggtatgttggggccaaattacaaagatttttgtaagaaaacagtgcaaggtggaatggttacatttttaagaccaagcgccctcaaatacaccttaatttttgattaatttacatatataaagacccttgatacacagaacaaaaacatcttccatcatttctgtttagagatagagtgattcttaaagagtcttacaatgaactcccccacaaaatgctcagtgaactcttgctagggaccagttctaggtggtgggagtagagcggtgagcgaatgagataaaaatccatgccctttggactttacacagcatgtgaaaataaacacatttccaagtaaagtgcttacatgtccgatagtataataagcagcctggtggaaaatcaaacaaggcaaaggaaaggaggtgtggttggggcaggcagggggcatgtgaagaaggtgaacaaatctatgtgggcttacttgatcttattgtttcaataattcagctaatatgtttctttattcatttattcactcaacaattgcatatactgaaatcctattatgtcattcaagccatggtgagacaaggaagtgggtttcacctcccaaggagcgcacagcttactctcagaagcaggaaaacgtgccaattacccatcacactcacatcgtttctaaagtagatcctcaattaggcaacacttcagcagctgcggagtcactccgtagtagtctgaggcaacacaagtgcatctcatctgaaatatcctctaatgcaggatatactggagctgttgcctagggagatactgctcaaggaatatgggttccacaagcaaatgctatgaagttctagttattattttgagcccagaatgagttgaggcctaaaaatgttgccattccattaaaatgtgttagtttgaatttaggcacaaatgttatttttgaattataagcatgcgactcgtttatagtaatgtagctttgagaggactttgggttatttgccaggccattctttttccttttcttttcttttcttctcttttcttttcttctctttcttttcttttcttttcttttctttctttctttctttctctctttctttcttttttcttttttttttttttggtagacatgggtctctctatgttgcacaggctggtctcaaactcctgggttcaatcctcccaaagtactggacttacaggcatgtgccaggccattcttgatataagctgtttctcacccatttggtccaaaaatagaggagacaataggccctctgtccagggcaatccaaggtataggactcacatcctgctctatgccatctataccattgctatttgccttctcgaatgggctggcagaaccgagaccttccttgaccagatgaggccattctggagctccaagcaggaagcagaatgaaaacatgtgtttgttttactaaatagctgttgcatgtgttggatgtaagagtcccccttgcttaaagagaaaataacctaagaacttgctcttcgtgcatttcacctttagaactagaaaagctgtctaattagattaacacacaggtgcatgtatgtgtgtgttagagtatagatactgctaaataagcccagtgtttctctgcatttgtctgaattttggaaaatgggatgaggctgattaagtggctttcatctgagagctgtgtacttctgtggttctgtttttctcctttgaatccctatcctatctcatttggcctccttgctgtgatcccatggatgtgttcaagtgtactgctagttccctaccactgcaaaaccctcctagctctgcctggtgaccccataaatccccagtgttccatgcctggtgctctggggagggaagcagatggcagggctgtccattctgccacccagtgaggcaggaggtcaactagggtaacagcagcaggtggggaggtggggtttctggtctgtgcatgcaggggacaacagatcatcaatgatccatgggcagaacagccctcatggaactaacactgctggcagaaggtggcagcagctggaggctgcttcagctcttgatcaagcacagaataatgttgggtgggtggctgagagttgctgcatttatgaattgtcactcagtggcagcactgaggtccccaagctctgtttacaaatggattttttgctcaaatgtttccttaactcagagcaactctctctcctttttttccctctcatcccctggccaactcctgtgcacgctttaggtctcagctttgggccccaaattcaggaaacatgttcctcctctgtgttcccttacccctgcgtactcagcctatcgtactgtaaatgctatgtaatctgtctcccacaatgggctgtgccctcgtaacaacaggggttgtgtcttgttcctcattgcattttcatggcctcaaaatgtatatctagtgctgtcaatatttgtagacttgagtggatctcatctatgtgcatggtctaatttcattaattatagacaaaaaggaagtagcagcttgggtaaccaaacaagcagataatccccaatgtatttctttaaggctttgcagtgctccccagggcaatttgggacaggggacaggttacctattttatatatatatacatatattagagatgaggtctggctctgttgcccaggctggagtatagaggtgcaatcatagctccctgcagcctcgacctcccggactcaagggatcttcacatctcagcatcccaagcagctggaaccacaggcatgcaccaccatacccagctgattttttttttttttttaaaggttttgtagagacaggcccatgctggtcttgaactcctgggctcaagtgatcttcctgccttggccttccaaagttctgggattacaggtgtgagccactgtgcctggcccattgtcatatttattaagtaaatatgaggacttaagtggtatttgaatattgatatttataaaataccctccactgccttcctcttcagcatcatttcatccttactggctctacctactcaaaacaggaatggttgtttatggaagtggatatgtttaatggaaattcatatgtttcactgacccatggttgccatcatgccatatatcataaagcacttttgtataaattaaatataaggataagcaagttattgctcagattagatactgtattcctcatgctcagacctgctgccagtgtcagaggcctgagagtatgccagctggggtgggtcaggccagcgtgggatttaaaagttctctagataagccacatgtgatgattgagctctctctctgctgttcaggcatgtggctggcaggtacatggggggcagggagaaagacactggacttagactggagccagtgtgttttatggcctccttagtttagattccgtgtggctctgtacgttggagagggaatggggctcccctaaccatagtaataataacaataggaccctcctatttaatcccatctctgtgccaaacacttggctcagtgctctcccacattattgcatgccccagcatcctgaatggaaaatactattttcattttacatgtgaggaaactgagtcctcacaggttaagtgactttattgaggtcatataggtaataagtgttaagattcaagttctcccttgaacttgagttctccctggctgcttttcccactaaactttgctgcctgaagagccatcctgggctgttctgattttgccattcactgatagctgtgtgaattttagcaagtcatgtcaatctctaggcctcagctacctttctgtataatcgggagatcactaaccgcctgctttggagggatgttaagaagattgaaggaaccaaggtgcatagcagtatttacgaaattattgtgagttccagataaggaggggtcattgccattgtttgtatttcatcctgactcctggaggctttaggttgtgggctgggaacactgaactaatattgaacattcttccaaggagcaaggcaatggagatactaaccttggtgatctgcacagcttgtgtgagccccgtgggctcctctaaaattgacagaatgatgaggaagtgagtaggagtggccccaagcatggctgggtaagggagtggagagtggctctgttgtgatgtggactgagggtgtataagctctctgcagctttttgggaattgtggccattatgtttttactatctcccattgtaagaaatttctgaattctttttatggtgaactcagtgggtgggtgggtgagtgaacaaactttcttcagatcttacgtgatatgtccacagttttctcaggcagaggatagaaggggttagatattagaaacagtacaaagaaagggcacctgtgcaaaccaatatgtggttacgtctaatttggaacaacaacaataataataacaataaaactaattataatattaacatttatccttactggggttgtacaatgtggcaagcactttttaagctattcgggtgcattatctcatttaatttttataataaccttatgaactaagtattatttttgttatcatttttatagatgaataaactgagggacaaagaggtgaagcaatttgcccaaggtcttatcctgattagtgatggatttaggactggaatcagaggttaggattgaaatctcagagccttgctcctactaaatattttctgtcatgtctttgcaataaatgagggaatagaagaattaaattattttcaggataggacattcgtgttgttcaatttcttattatccagaccaacagaggggaggtgttttagttcatttgagctgctgtaacaaaaatacctagactgtgtggttgacacaaaaacactttttacagttctgaaaactgggcaatccaagatcaaggtgctaactgatgccatgcctggtgatggcctgctttctggttcatagatggcagtcctctgactgtgtcctcacctggcagaagaaacaagagggccctctggaatctcttttttaaagacagtagtctcattcatgagagatccttctcatgacctagttagcttccaaaggctttgcctcctaatatcacattggatgacaggatttcaatatatggattttgaggggacaaaacattcagaccatagcagtagccaaagaccacacaagtgatttgtgttatttctggtatgcattatgaagggttttttgatgattttagagtcagggtataagaggtggggaagcccaatgactaaaaatatagatatatattgaccgggcgcagtggctcacacctgtaattccagcactttgggaggccgaggcagggggatcacaaggtcaggagatcgagaccatcctggttaacatggtgaaaccctgtccatactaaaaatacaaaaaattagccgggcatggtggcaggcgcctgtagtcccagctactcgggaggctgaggcaggagaatggcatgaactgaggaggtgaagcttgcagtgagccgagatcatgccactgcactccagcctgggtgacagtgcaagactccatcttaaaaaaacaaaataaaacaaaaacaaaaacaaaaaatatagatatatatttattctcaataattttgtttatttgaacttgatgtcgaagagtctttctgttttctccttggaaatgtctcagaagtcatgacctcccatatatgttttcttctgttatcttttgttgataccatttgcatcagaagaggtcttcaactatttgcaaaagggaaaaagaaaagtcatgaccacccgtcagtctttgtccacttgtctctttcaggaccacggacaggggccaaggtgtctgagtagacaaacattttagttaagctacgcctgtgttcttggctcaggttatcttctttgaggccttttttctgacttttataggatgtcacactagcactgcctgagcacacacctgctgacatcagagtggatgatgctttaaacattttccaaggataatctgcggatgggtaactggtcctgtggcctcgttgggacttgacagtactggccctctgacttgcagtttgacctgcctgcctgagattttagtgtggttggtgccaagatttaaaggaagtgataagcacttacttgttcttcagcatcattaaatgataatgataacatgggtgatgacaattacatatttattgagtgcttactgtgcgccaagtactgttttgcatgtattgttttgtttaattcccaacaacaaatcttggggatatgaatagttttagatgaagaaaatgagacacagacagatatttaaaatgtgcaagacaacccagttatgtcataaacagtggagcagagtcccactttaccttgaggtcacgttgtgtgcactcccacaaggtcctcagggtggaaagggaggggctgacctcttcagagtgcctatttgtgtgctttgtgaatattattatactcaaagcctatttcctggggttgtgttgacataaaaatccccactttatagtagaggaaactgagagagcatttaagtggcttacctaagatcgcacagactatacatagagaagccaggtttgtctgtcttgaaactttttttttttgcagtgggctatttactatttatttcccagatggctctttacaccattgtgggcagtcctaccttacagtggggtctggtttctcaccttataggaggatgtggttgatacttgataagatttgatactggtcaggcgaggtggctcacacctgtaatcctagcactttgagaggctgaggcaggcagatcacctgaggtcaagagttcgagaccagcctggctaatatggtgaaaccccatctctactaaaaatataaaacattagcaggatgtgatggtgggcacctgtaatctcagctacctaggaggctgaggtaggagaatcgcttgaacccaggaggcagaggttgcagtgagctgagattgcaccactgcattccagcctgggtgtgacagagcgagactccatctcaaacaacaacaacaacaataacaacaaaaacagcagcaaagatatggtgctcagtctcctcttctgcttgggattcaagcttgtctagacaagaaggtggtgaagctcttgatgacagggatggcgggtgaacttgtcttaggtgtgcaagtgtggacccagaagcaaaaatgggtatgctgtgcagaagggttaataatcacccccagtctggatcattttgctgtaacatctgctgctaacccactgctaggagggggaatgccaattgtagtgctgctggagtagattttaaaacagaaaacatttgtgtgttgaagtgaggactggcgttctgttggttggatgacataagtcccaatttcttccatttccccatggtgtgcttgcattttggggcccaggtatactggggagggatgacccatatggatggagtgtaggctcactttggtgtggactagtctcactaataaccacgtaattatcattgctagaaaggactacagatcattctggaaaactctggaaaactcatttatttatagctaaggaagctgaggcccaaagtggaaaaacaggactgaaagtctgcatttgactttgaatccaatgctctttccctggtaacgtgattaataccaataacatgaaaatattatcaatagcattaatatggtcagtaaagcttccaccagaaataagcattgggccatatgttttgaagtttgtcaagaccactataagcagtggccctttccctcaaagaaggaattgacattctgggtcttgcaatataaaacagagatatcatcatcattatcactgtcaccaccaccaccaccaccaccacgctcgtcctcaccatcagacaaatctattttcagcacttactgtgtgccagattctgtgctatgtgctttatttatattgcatcataatttaaaatttatggcaaatctattgtgaaccatccttgtagatgaggttcagaggtgtaaagtaactattacaaagcctaccgttatgaagttccacgtgggggatgcagttagagaagacaaaacagtgtagaggcttcatggtggtgagacttgtgggggaacctgagctaagctccagagagtgattaggacagagaaaacagatgagatgaggaagacagtcctgtcaggagcaatctgaaggatttttgcagtgagggaagttgtgggttagactcagggacaatttgtagagaggtctgagtaaggaatgaatggcttccaatcactactgagcacatttcctgttccataccccatgtaaggcacagggtgtgcagaggtaagaggcatggttcctgtccttagaaatgggggggaagaaaccaaaacagtcaacccccatcctggataataagggttgggcaaagggtaaactcaaaggaccatgtgagttcagaggaatggggtcaaactcattcctcagtggcttgctaagggtttggctttacattaaaagccagagggagctacagaagtattctgagttaaggagtgacctggccagatcatctaactggggagactctgcagatactgtggagaatggtatggcgacaaggagacctgttggggcagcagaggcaagcacagcaaagccccccagcaacaacagtgtcaatgtcaatgcagagataaggcagaaagaagcgatcatgagaagttagaatggatagggacttggtggagggaggaatggggatgggcccagtgggcatccatgggaaatgcatttggagcctgttggtaactggccttgaaggtcatcctccctccttgcctacctgttcttggcttgtgagtaagtacacggagaacatgtgttagtgccatcccctggcttagtcagctacccaagctgtagcccaaagcccagagctccccaaagtcagagcttgaggctgtcccaggatatcactccatgcaaaggctgattccactttgcggttggactggttgtgtttgcatttactgtgccagccacacctgctctcctcgacgcccagtgctgagcctaggtggctggtgaagggcagacttccaggagcctggactcactgtggcagggaaggaggggagaggcacagctggtgccaagaggatattaacctgacatttagcaaaagggtgaatctgtttattgttctgtaacaatgaggcatttgcatcctgagtcgccttctgttttcctattgtctttgctcctcagtggtcaggccaggctgcagtcttgacagtttaaatcagcatggtaatgaaggggtggcacctagtcagttcaaaataaaaaatcaatctcactctctttctctgacacacacacacacacacacacacacacacacacacacacagagagagagagagagagagagagagagagagtctagagctatactgagtgtccagaagttcctctctccagctccttccttgatactcttaaaattgtagtatcccaacccagataacttggaggtttggaaaggggacccctgtattccttctgttgcctccaccatagcctggctttccagctaccaacagaacccacttgtaggcaagaagaagcatgaattgaagtcctgatgcatgcatctaggaatgctgagaacgtgacagaaaagctcttacacaagctgggcatggtggcacccagctactctggaggctaaggttggagaattatgggagtttgagtccagtctgggcagcatagtgataccctgtctctatacagaagaaaaaaatcagacattcaggttgaaaatttaaaaaaatattctctatagcttcataaatattttagcattgacagggcttgtgtgcttttatcatctcacagtggtatagtaagctgggtgggagaggtgtcatgctaggtgaagaagctaagacctaggctcttggatgtttataatgtaccaggcttggtactgggtactttaatggcatgacatcatgtaattctcactaggatacaatgggacaggtctggttttcccattttacaggacactggaaaagtttaagaatgttttcagctgggaattggcagagctgggaaggaagccatatctacctgaccctggagtggccactccactactgtgggttgcatggacaggtctggagagtgggcacagtgttcagttggtgccatgctgtctgctctccatctactccagtagcccacagtggcttgcaatgaagccagatgttctggagaaggaggaaacactcttttgcttctgtgcccatccttaccaccagaatccccacagaagatataacttcttaccctcttctttttcccaaattagatctggtaagtcagcatctgcataccgacctcaggatcatttagaagctcacagaatgttctgtctagaaattgcctccaggcaggatttacctatgacagccttggccagtggatggttctatatctttatgcccagttcaaactctggaacactgtcatccctgaatccctccccatctcccaggtccctccctctatggcaggaaaaagatccaacaggcctgacatggaacttgactgctagggtttatagtgatacaggaggcaggagagagaagtagaaaatgcatataaatacatctcatatacaatgtaacttatcttcagttactaaattagcactctttgctctccctaactatatgcacattgatatcactcctcttgcagctcaataggtatgtggtgaacctcttgccataaaattatgctcctgcaaagtgatgggcctgagcacagttgggatggggacagaggaaatctcacaggtccaaagctaagtcctgctccttcagactctcaactgggttcccaagctggcatggatagaaagggcacagtttaccattggtaaaggctttactctttagaatttgccccccacttcaaactcactcttccatgcctgtaaatattcttccatggacttccacttgtcactaaaggaaagattcaactcttgagtcttggtgtacaaatgaggggacctattgcttctttaatgtaccagtctgtcctcaacatggagaccagtttcatctcctttgccttccatcagatgtggatgggagccctgtattctgctgagctaatagaatgcctgtgtccctactggaaggtgacagggaagtatgcatccagcaatctatgggaatatcaaggccacattcccttttttaaaatgaggatggcagtgtgttagaatagaaagagttgacatgaggaacagctgtgaggttatgaattctgatcttggtttggtcccagtcaattacgtggtcttagttcccatttaaatgctgaataagtcaatcctcaggggtaaattctttcaaaatgctcataaattgtgaaatcctagtgttggtggggaccttggatattcctttagtgcaatgactgcaaaatatgactgtgcattggattgcccagggatgcttgctaatatgtcaatagccaggctctagcatagagtatttaggctccagcatgggtattttttttttaacagtcggtcctccttccagtgtttgggaacaatgatctggtttatctgccagctcccaggtagaggaaaatttgcaatgaaatcttcccagcatggctactcttagccagtccttactcccttcccctcattgacaactttcattctgtttctaaggagtagggctcttaccaaaatgtcaatgtgacccacctccagtccactcttttcttcgcagagcgtaagaactagttctgtctggcactcctggaatagtcataggacagagaaaagagaggaaacttttgagttctgataaacacatctgcagcacacatcttgtgagttgctcagtgttctgtatcctcttgtcttttctggtgaggatttgatgatgaagttggagcatggtcttcaagggctgaaatccaagagtttctaagtagagtaacaacatcatgaagtctcttaacatcactatgagataacccgtgtaaagagagatttaataaccatcaaatacttgtggactctcccatgcttccaaggccccttgttgttgagtggattgtgcacagaaataatatatgtccctcctagtccgagtcagtaaaatgcctctacctgcttctccatgctctcccttggcctttcatggtgattgcagaggccatgcattgagattgtagaccacaagatacaatcagcttgaatccctgagtcatctctttaaaggaagctgtgttggagagtcaccagacccaaagtgacttttcctgagtgagaagtaaatgtttaagtgttatgcctttggaattttaggttttagttgttactgcagcataaccttgtctatcctgattaatgcagttggtatcatcctgaagcgtactcccttgtggataaagcttctagttcttggcgtgtttgggttgcttttcctcctaaaaactgaatggaactagaactttctaggaaccctttcaagctgcagtaatgatttactgaagcagaaagaacatggttattttgagtctcagaagaaaaacacaaaacaaaacaaatctaggactgttgtctttccccaagaaaggaattaaaaatagactcatatggacaggggaaaaaaaaaccgacactgcctgatctggtgtggacatgttcttcgaaagtattaattgcacactcatgccatttaaaaatattaatttaaatgcacacagcttgtaaatctcttcttgttctgtctgctggatgacttgggacaaagcaagctgagaattaattgattaataacaagctgtgacctgtgtgtgtggttttactgacaatatcctcaggacttgggcttcttggagccatgcttctgtcagtgggaaaagtgctttcatctttagagaatgttaccactaagcagagttacctaatctgatgctttctcctctgggtatggcagaagtcgcttacttgagaatggatactgatatgttatttttggagctgtatttaggggatttatttggcacatgtggtatatattatagaatggcatgtagggtgaagccacggactccacaaagagccttctgtccattatgatctgttgcatactgaaaatttccactctgagtaatgcatatctttacactaaacatacatcattcccagaagttgtttgattaaatataaacatcttgcctagggaaggcaaaatattaagctgctagagtacatttggaattttcttagaaaggccctgaaagaataggatacaagtcagacatattttgatgggggatgtgaatgagggagatgaaccactgaggacagagtcttgaatgagcagaacattgtagtggaggagccgtcagctcaacagcacagattcctggaggtggacaatgacgtaggttccagggataaaagatttggatttgttcaggacaggccgtgagtgcctgccttggtgtgttataaagatcctatgtggttggtttctttaacattcaacacaggattctcgaatattttagaaatgtgcttgggtttttttctgtaactcctaggctagagttacatcatatcatatttagttcaatgtgtctgctgttctcaagtgtggtggtgctggcaggtaacaacgaggaagaagtgaggcagggctcaaattggggaatacatacctgtgtgcatcctggcccagggagtgggctgaaaggagggcaggagtggactggcctgctcaggctcccacacctgtgtggcaagaagggtttgacccagagaagcagagcaccgagagccacagaagctccctcttccttctttgagtgtgcctagggtctcagcctcagctttggcacccagagccacattccaattaggttcttaggggagtagccccttccttccttgcagagaaacctgcatgaaagtttgggggacttcactttcttcttgaagacatcttatgtccaaattaatgctactatttcctgtgtctccactgttttgacacttacctttttcatgcacttcccagagcatatttcttttgtgccagacactctttccccagaattctttccccagaattcttctccaccattttgtttagaaaaaatatgttgatgagtctcatggagtaaggggtaagacctcaaggaaaatgctccaccatcaaaagatgccataactttccatccacagagtgtagattgtgttacctggagaatcttttgtttggtgagtgcccaccttggtttagtgtgaaagtctgactgtaggtcagagcaaagcagaattgttctgcttcgaagagggcagtatcagtcaagtgaggccatgctctgctacagtaacagacagcccccacagtggcataacacaagaaaggtttatttcttgctcaatacagtatatatcagtcatgaaggtaggaggccagtaggagggtggaggctgttcatcagagtcactcagcaaaccagattgatggaaacttcctcttggtctttgcttccagcaccgtcttggcaggaggcagtggtgaactgctctggctaagagcttccatccagaagtgtcacgcatcatgtggctcatgttacattggctagagcaaaccactcagcactcagccacacttaactttaggaaactagaaagtgcaatcctacaattgcccagaaagaggacgtaataggagtatttgtgaatatccttaatgacatctacaaggggtgaagactgctctagtgaaaaggtgaggcttttggagggcgagtgaaggacttgggcttcttggagccacctttctacctcaaggaactctgtgggaaaaggtcagggaaggaaatccttggttgtgctttggcctggaaggaactaaggcaaactcaaaatctgttagagcatttgccatgagatatgtgatttaaattccttttctgccttacctgtgaaatcttcaacagtctgtgttgttcctttttgcttgtatctggagcaatggcatggggtggtgatggggtgggatgagggacaagagggagaagctcaaaaaagtgtaaccttcaggatgaaagttattcagggcaaaacaagatgctgtatacatgggcctaggcactggagaagccagagacagctgacacctgagttaatgtacctgttatttttcctcctagcttataaattcctcaaggtcaaggatggtttcttatttatatgtatgttctccgcagagcccaaaactactctggcctcagtaggtgctcaattgcttgaggcatgtttgtgggtgaatgaataaacaaatgcacttctgcctccttctcttgtgtgccaaggcttgcagcgggccagcagccaggggaggatgtggggtgggccagcactctctttgctcagaaaagcaacttgcctagttctgcatccaatcttgacttctaagccaaggaacgaagtctccaactgctctcagagtaggatacaaaaaccttcctcaactcttctcacctgtgcttagggacatttggcccttggtgaataggtccaccaagataccaagaggtggacagcagcataggagactaatttcaactgtcctttcacaaatcttctaggacgtgagtagggactgaccatcaattcatttatttatcaaacattgaaagggtgcctaccaggtgcttggttctatgtcaagagctggggctgcacccttctgtaagcttgcctatgagtgcaagctgctttcatactagaaggtaggatgataggtgaaccgccttctacaagtggagacccatggggccctctggttgtgcctccacagtagagtccatggtggtgtgagccgtaacaagcacagtccatggcggcatgagcttcagaatccaacacacatggattccatcactggctatgcatcttgagtctgatcttgagcctcacgtttaacctctctaagcctctattttcaactctgtaaattggcgatcacagtgcttaattgataacttgttgtgcaaatgaaaagtgaaaatgcaggtaaaatcctaagctcagtcacatagaaagcacttagtgtcagtcaatattgcaatatgatgatgccaatattgttaatgataacctttctaagttggagtgacctcacctaaaaatagtacctccatcactgagcctatggtaattacacgagatagtatgagacacttagcactttctgggtacaaaacaatagtgagtaacatttacccaagactttattttgtaaatgcctctcttccatcactactgcctcacttggggcacctgggagtatccaggttgaagatgcgggctcaacccaggagtcaagcaaacaatttctagtttttgggatgccttaaacaaaaccgtgaatctctaagctcctcaggctggaaatggctcactgctggtggaatcattaagagtgccagccagatctgattgctgcattcagaggtttattaatatcacctcgaatttatcttccctgatgaggaaattttgccagcatctgacaaaaatgaaatgtacagcggccttgtgccaacaagcatcctctccctgccatcggctgttagcagaaagccagtgcagtgggctgctatggggctaataaaaatataagatgaaaatgggcttcgcatcttcaattaggaatttgggcttccaaccctcctcctgaggctcccttccccacaaccaggctatgataataaatttcagaacctcatctccctctgcgagtgtggattctctccccaactaatcctccaatactcatctgagcataacactcccgatgaaaccacacttgtcccttctaaacacttcaatgaattcccttatcttccagtctggaatgtaaccacaaaagaatatcaatgagaggcatgagtggagctggctacaaatgaaacgtgaacaaaatcttggtggagtgcaatagggtttcagcaagaaggatcccaggttgcacttcccaggtggaagtgggttccttagactacattcggtgagtcaggtggtcacctgtggccaagtggaaagacccttcaaggccaaggaaccagacaatgtcttcaaggcagtcttgagttatcctgctggggcctggcagttggcagtctaagtggtagggggtgattgggaaggcactacaggtacgtgacgctgtgtgatagagtcaggagcaaggagctttggaagcttctagcgccaaggcaccttcagtccattatagaatgtccagtgtccccattttatgaatgagggcatgacccagaaagaagtcacttgtccagggtcacacagcaagtcagggtcgcagggctagagctagaatgcatatctggcttctctgaccagcagtctttcccccagaccatatccctactttcctttatgtggttaactttaattaagctctttctacctaccaagcacacccctaagcagtgggtgtcctcctttgaccttcataacaatctcgtgagaaagatcctcttggtgctttggtttgacacttgcatcttggggatgggaaagtttaaatgacttgcctaaaattattggctgaggtggtgggttcagggttccagcatagatagccagctctagagccttgcttgtaataagcaggctaaaccaatgcttctcaaagtggggtgcctggaggagcagcgttacctggatcttagaggtgcagattcctgaatcagaaactctgagggtgaagccaaccctctgtgcttgaacaatccctccaggagagtcccgtgcaggctcaagctcaagtttgagttggtctaaactacttaagctggtaaatcttctgtattttacaacgagtcttccttttcatgctttgtaaaccaaattgctgacttcccaaacctgaggacatttccaaggtcatcgttacctctcagcagcccattttcaggtggcctcttttaactgtgggattctttaggaagactgagattggcacaggttccctgctgcccagcagggctcctgagcttgaagacagcaaaattggtgttgttgaaccttctgttggccagaggggattttgagagtcctgtctgctatcacgtggacttggaaaatttggtccagtcaagtggaaaattaataaaccagaaaggaaagggacacagtattcaagacactaaatgctcattgcaaccagggagcctccaggtttctaagcattgctcttctgaatcccacactggagatattttcctcttaattcaatagatgtttatcttgcgcccaccaatgctgagtactttgcttagcactgggaatataaagatgaagggatgtggtccctgcccacagagaacccacagtctagaatgattatgtggtgatgggatcctccactggggaaaatgcagtggcttttacttgatgcagtttatgatgtttggttaatagaatgtcacataaaaacaaatcccctgattatcccactgccaatgggtggcactgcattctaataaaggcagcacttctttggtggtgtgggggaaaagaattgcagcccagtgcaggagagcctgatgaagactttattatttaatgaaccatgtcatatgaacagctgtggtgtaaaccagccaggacaattatgcaagttggattatgtctccagtaaattgatgctactttatttgattaggttggttctccaaagacaaattcttccaagttgggttgggggaaaaaaatcaccattctaactttgcttctgactttcaatcttcagattgcttttgctttctaatcctaagaggaaacaaacacaagatggcagctatgttgttatcatcaacagaaccgagaataatcacgtatctgtaatagttatcagcatgctctgtacgagactcacactgtcttttctcaatgagcttgcctggggggcaataagagacaggcaggaaactgtgaccattcctttgtgagtccccaaaacagcctggctgcagctcactaagccattgtcttcctttacacacaaccaaacgtaggcacatggctaaataaacataatgaaaagaaatgggcttggtgtgaaattcttcccagatgcccttccctgccttttcagattattaggtactatctagttcagtgtcactgtgggtcatggtccatcagtagcttgtgaaatctatttaatgggtcatcaccaacatcataagaaatgaagcagaatagaataaaacatcatagtacatcccattatatatagtaaaggtaaacattgcttcgtgtgtgtgtgtgtgtgtgtgtgtgtgtgtgtgtgtgtgtgtgttgggggtgtggtggtgtcttctgaaccatgttgtaaagtacatttcttcctgagggttgtggtcaaaaacatttgaaaaatactattagttcaagctgtttattcacagacgagagggcagggatgatgaaattaccctgctaggtggatgcaggcttttgaacagataatgtgagagcttttaggaagagagttggtgagcaccaggagctaacatgggttcacctcagccatcacccagacaagcttcagaccagactcaaatgtgatggtcttcatgccacacaccaggggtcatgaatgggctggaacttacataaacacaatcaagatggataacgagcaggtacaaagcaacatcttaggagcaattgttaggataactagaactattcctgctcttctccaagccattcagcaggggcgcaattgacattctaaaatctttgaatgtttgtcatgtggaaaatggaatcgatctcatctctatggccccagcacttagatgggtgttttgatctaggaaacattttctttttctttctataacatctctgatttgccctaattcctgcagccagacagtctgtaagtgaaacaggctgcttctggatgaaattcatttcctgtaacaagaggggatcaaaaaggaaaattatttgtccctgatgtggcctctgagggcagtgaaaatcactggatgaatggttagattcatcagtggcttttggccttaagacactgtacacccaatagacacacactcatgccctgcaagtacaagcctaattttcctgtactcacctttactacatgtgatgtactttgatagtttctattctggaatattctattatttcctgctagttccatctcattccatcccactccactccacttcatttcattccattctcatttcatttataaaatgacggtcaggactcatgaaactgatctcatggtccactaataggttgcaacctgtgattttaaaaataccagattgggttatattcaaattccctttaacccccaaatcctgtgagtccaatgtaaattgctactacagtattagggtacaaaattctgtgcacagcaggctcacagataaagtttttgacaaactgaaaaccatgtgttattaattcacttactcattgattcacttcctcatccatcccgttcattacttaccatgtgccaggtactgtgctaggccacattgatataaggtaaataagacacagcccctgttctcaaagagctcttggttacagggacactgattaggtttcctggggttgccaggatcctagcatctgctttccctgagtttccttggaaggaaggtcccatgcatgacacatcctgttcgctgttcttgggtgacgtatgtagccctaaagtcttggcccagtagcagagaatttcacatccttcagtaaataaaaaccaaagtcaaaatgaacatatgctagaaaacagagactggcagtgctgtgaaggccctgtcccctcatggactctgtcgtgagtggcttaaggggaagagaagtgctcctcttaccggcatcaggagccctaattactgttgtatattgattcctttcttccgcagaccgctaatcctgcagagcaacttgcagggcataataattgggattgcccaatgctgggagctaatcagatttcttatgtgtagaccagctttatgctagcgtttaaggaagctcctgattcaagcacagaaatgaactgtttaaccatttccgagccagagatgagccatcacagaccaacgcggagtctgataggttaggggtgaattgcgctggagaggctgaacgtttcttaaagtccactggcaacaggaagtcctcagaagtccaatttgttgttgttcctccctgaacttctggatttctgaggatggttgtgagagtggccgtgtgtcaatttttaaatcatgtggtaatttgtccatgattgtttattttgtcccccagcaagattgtatactccagaaaaggggtagctgacctactaggtgaaatcatgctgtagttctgagttgctgcttcttcatgcatacaatggaaacaagtacacccccaccaggctcatgtggagggctcagtgactaacctggccctcagctatcccctgctactcccataaaagctagcactgggcatgtggcttgtacttccaacaatgagtactcccttttctcccctaaatccagccctggaagcattgccgtgtttttatgcctcttggcattctttattttttgagacagaatctcgctctgttgcccaaactggagtgcagtgtcacgatttcagctcactacaatctccgtctcccaagttcaagcagtcctcctctctcagcctcccaagtagctgggattacaaatgtgcatcaccattcccagttattttttgtatctttagtagagatggggtttcaccatgttggccaggctggtctcgaactcctgacctcaggtgatccgcctgccttggcctcccaaagtgctgggattacgggcatgagccaccgcggccggccatctcctggaattctttgtccacttttctgtccttcctctcttcccttctctcatgctacactcctctttccacttttggtcaatcagccaaaattacaagtacttttccaaaccttggggtattggagtccatggctcctggctgctgtgcatggtttccccttttcctgggaagcttctgtcccactccctgcccctcacctcaccctagcactcttcataccaaacaaaatgacctttctgggtgttctccctggagttccttcgcttgcgcagtcatagcaggctagcgcctagtgggctgtgtgcatctgaattgcaggttgaatccaacaacatcagtgaggtgggaggcaagtggctgggtgcggtgccatgacattctggctcacctgtcatgttggatggcttgtgtgagccccaggaaacccgtgcacccttaggaaagcatgggatagatctcctgagatgatttcagagaaatgacagcagaccattgtgagggaggcagcatgactgggggaatggataaggcttaggtccctgagaggcagatccactccagccttgcggaatgtcatgctcctgcagagggctgcaagaagaggtgaacccattcccaatcactggccaggttagacaaatcattggattctgggacatcagagctgaaatagctttattggatcatctctggcccagctcgcttgctctctctctcaatctcttgatcttttttatttatttatttttttaaatgataaaaacaaagttcagagctggggcataacttgtccaaggtcactgagagctgtaaccatcaacatgtggggcagcagctgcctgggtttcaaagaaaggggacttgctgccattcctcctccccctagttgccactgtcttctcatgggtttccttgtccttccctggtgccgagaagcagggaggagggagcatctgttgccatggaaacaagcctatagtatgagttcgctctccccaactggctgtggtttctctgacaggggctgctactggtcctgctgttgggccctaatggggactcagggaccaccactgtatttgccaggggagaaagctggaggagcagcagacatcccctaacatgagttgtgcaggcttggtaatgtggagtgggcatgcattgtggtgattcttcttgcttttttaaaccaatttctcctctgctggagactcttcacagaatttaagagtctttctcagaaggtgatcagccttggacagactttggtcttcagaccccagagccaaacttttgaactgacagcagctgtggccaaaaatggtgtttgtcagacctgcaggaagaaaatctgcaatgaagagttggagtggtaggaaaagaggaaaaagagggaacttgttttgccttcagacatatttaagtctcctaagtacttcaggagttaaaatggggctttgaaaataaatagacttttctgttcatgtggggctgaagtgttccagggttggaaagggttttattaggtcatttcatctctccctctgtctctgggcctattctaacccctcttacttataaaaatcgcagaagagggtgatttcataagctgccacgacaacttgttccgctaacaattcatgatcttaaaacaatctccatagcagggagaaattcctcctatttcctccaaagctcgtctgtctgcgggccaaggctgctcagaggcagctggggttttaagaagtgagctctggacttggatttaatggtctttgttcaaatactgttattgcatccttgaacaagtcacataactgctccaagcctcagttccttaatctgaagaggttagtgtgaaggggagaaaaagtaacatatgttaatgtgcctaagatggtatctggcacacaggaatgcttgttagatgtgtggtgtggctttgggctgactaggatcaccatggtatgggcaccttttggatcgagatctcagaaattaaccctttggttgttggatcatggggttgggatgggggataggcactgcagcagcaggggcagctgagggggcactcctaagtcaaggccattggctgtttaccagccggtacaaaaggtttcaatatttgagagactggtttagttgtactagtgcacgctgtctaaattatcatccctagtggttccttcaaagacgctaagcacattcctgactccacttctttgtttatgccactcatgtccccccatgccttcaatgcctttacaaatcctcccaacccatgaaaatccaactcaaattctgcctcatacatgatgcaattcagcaccaaacccataaatctcatgccccacaagctttatccaggctggaagagagaagaggagaggttgtttctgtgtggctgattgagctgttggctgactcaagcaatcacagagcctcaggtatcattcaacctgcaaattatagatgaggaactgagaccagagaggctgtgggactcatcccaggccatcttagtcatcaacaacaggtctagagccttggtctcctgactctctgcctatacttcttgtccatgactgaggctgttccttgagcctggaatgagaacagagtcgtcccccaccctaccagcactcctcctacccagcacttgcttgctgagtcacacggagggaggtgggtagggggaaaatatatatttgcctggagaacacaccagtctggaaaagtgaagccagccaggttcagtgtgggtggagtctcccaccagggatcccaccctagcactaaccagggttgaggtgctggggaaaatgaaaagcattggtgtctttctgacccacctaggtgagtgaccaactttaagccatgtgtcacaacgtggcggttttactgtttattagaaccttgcttggcttagcttttgtagaacttggcttttaaatagaaattccttatactaacttgttctgctgtcagggagatgctggccagcctcgaagcacctggtatatagagacatctggagagcgtacttcaggctgggaggctttgaagtagatggttgtgggctcgtgtgtacatgtatgtctatgatcccctttgctggctgcaaattctgtcatcacatcatggaaaaattcttcttaaggaaagttgcaggtgcaaagatgctgatgttggatcaaccgaggaaatacagttttggtcacaaaagtggtatttatgcactctgccggcacgtggttggcccagatggcgaaaatactgttgagatggccgggctcctttgggtaagggaaatacagggctttaagagcagtagggaacagtgaaggatagagaagcttgatgctttggagctcacaggatcagagttcaaatcctgacttggcggccattttagctgtgtggccttaagcaattctccagcaccttgagcatgctttatgggtaggggctcagtgttaatttgggattctttctcatgaggatctcaaagataactgtagctgggtatctcaggggaatatggcccacagttttgagtcctccagcctcagacatcagagtagactcagggcaggtaatgtatgtgtgatggtggacacacattatctgcatggcggtggagaaacctgcacatgagtgatccctcatgctgccattttggtcatgtctcagtgttaggaaacttacagctgctttgcttcatttcctgacaaggcggcagctggaattgtcgactttgctgttatctggaacagctgctgggatttaatagtgcacttagaggaattacctggaatcacagcaggcattatgaaatgggaatgcatttctgtaagcccatctaatgtttgagggcaagagagcaggggctttccctccatagtgagtgagacataaaagggactggtttgtctgggatgttgccctcaagatgagcaatcatttcatctgggctatgctcagcatggcactcagcttgggcagtgtgtgaacttcagtgacaaggtctgcttaggggacctattttcagatcaattgctcaagaaagccaccatctctgggcacctggggagtgacagccatcttggctaggactcaagggcaactctagatagttcagtgctgagcctgtcctcccactcactcctctctgttggtctggcatcaccagactggcattttcctctcttctgggcccagtcaattcacttctttctctgatatttagtaggtgctcatctacagcaccttgtcgctgggtatgctgtgcttatcttaaggtggcttaaagtctttttggaaaacaggttaatgaacatgcaattattagacaacaatggcagcctaagttgtgattccaaattgaatctaagcaaggtagaatgagatgcttctcaacgtacaatggtgttacatcctgatagcccatcataagttgaaaatatcataagttaaaaatgtgtttaggccgggtgcagtggctcatgcctgtaatcccagccctttgggaggccgaggagggtggatcacgaggtcaggagatcgagaccatcctggctaacacggtgaaaccccgtctctactaaaaaaatacaaaaaaattagctgggcgtggtggtgcgcgcctgtagtcccagctacttgggaggctgaggcaggagaatggcctgaacctgggaggtggagcttgcagtgagccaagatcgcgccactgcactccagcctgggtgacggaacgagactccatctactgaacatcatggcttagcctagccttaaaccttaaatgtgctcagaacacttacattagctcatagttgggcaaaattatctaacccaacacctattttgtgataagcgttgaacattgcatgtaatttattgaatattgcacttaaagtaggaaacaaaatggtcgtatgggtacttgaagtacagcttcttctgaatacccattgcttttggagtattgtaaactcaaaaaatcataagttgagccattgtaagttggggactgtgtctgcatgtacagggatgatataaatgcccttggagcttggaagagggagaaatttctgaaggccagaagagactggctttggatgagctatgtaaaaccaaaacccttgtagccttgttgggattcagggagccatgccccttctgctgatcttgcaattgatgacctttgaactgaggcagtagtagagcttgggttaaattaaaggaaagggattctacctcatgtgttcttttgcaagttgagagtgtcaactggtctggggatgacttgagctgcgtgtgctatgttgcactggtgaggtggtcacttgacctcgtaccaatactggcttctgagtggcttccaggtattgaccttggctaatgagattggattcaaagcatttgcaagtgccagtaggtcagtgatcaccattatctactgtgcacctcctaaatgccctgccctttttgcgtaagctgggtctgacagccctaatcggtcctacctcctagatagcactgtggcccatttattcttacctagttcaggccaccatcacttcttgtgtagacaactgcaatagtgtcctacaaatctgctgacattccctcctaaacaccccctctctgtcaaatccattcttctaactgcggctggtagaatctttctaagatggttttctgatcatgttaattcttttcttaaaactcttcatttatttctattgcacttggaagaaaacctaatcttattatatcctatatgtgttgtctgacccagaatttttgtcattctttatttgatactcatgtggctcaactgcaacagcagcaaacagctgggctctacccatgtggatccctctacttggaatgtctctcctcttctccctttccccaccttttgcttagcctccacttactcatccttcttgggcatcacccctaccagatcaggttagctgctcctgttccacagctcatagcttgctgtactttccctttgcattccctaatgaacccccatgtgttatccatgtagttttctgtttagtgtctgtctcctctttccctttcagggacccttgcaaggtccctgagggcagagaccacccccattttgttggctactgctcaagacctagcacagaagcctgcagctcagcaggctctcagggcatgtttgtagaggcagtggctgctttggggtttccagagcttccttgggaggtttcttctgtgtgtcccattgaccagagcaccactgggggtgaagtgagccccagacatctttaggtttccatctttaggtgagctttatgcccaggcacgtagcagaagaaactgtttctactcataaaccaagcaaatttatagtggaaatcagtgggagaaaataaatatgaatccccatgatgtcattttatgggctgctttatagattgtaatcacccatttagagtttgcaggctattaattttgtttgcgcagagcctcaggactcttggggacagaatttacagggctgtggtgtcagacacgtggttctaggtcttaaacccctgaaaggttttggaaagagaatgacaggtagcctatggagcagctggggcttagggctctttcctctagctttcctcctggacatagttttaaaatatttgttcactgttttatcatcttaattttaccctagtcttcaggcctgtcctttccgtaagctaggtgactatgtgggtcttgcattaaacctttggtagagagagctcccctctgagaacctgaagagatgtaaagaggaacagcacaaggtcagagagaactgggtagaatccagctctactccttggcttgtgatctagagccaattttcattgttgttgttacttttttcaaccttcgtttctttctctataagttgagacccatgccctcaacctcaaagggtgattataaagataaagaagaggaaataggaaaagcatttggtactcaaaatgagttatagttcataaaatgactatgacgattgctgttttaaggtaagctgatagagtgggaacacagtggaaactaggagtcagggcacctggtcccaaccctgtcactgatgtgctgggtgattttggacatactagttagcctctctggtcccaaattcttcattggtgaaataaaatgtttggctcaaaagattttcagacatggtgcttctcagtgtggtccatcgaccaccatcccctggagacttgttagaaatgtagattctcaggttcagccccagctctcttggcccagcagtcaaaattttaacaagctctccaggtctctggtgggcatagtgaagtctgggaagcattaccttggttctagcactcatgtccgatattgacttcccaagcagcagtcacctctggagccttcctctttggggtcttggaccgcaatggcctttggcaaggagtctctgctggatctgtgctgcacacggggtgtgggaatctctgggcaaccagaagagcagtagtaacatctttaggtaactgaagtcaatcctgcccactgggcaaatattaattggttgctcagggctgcactgagttcaaatactgagccactcaggggcttcgaacgaccaagatcaggcagttttcaacctgtgatccacttttggtagatttaaggcaaaagcaaatattttttgccattttttcccaaattattttaccattatggcacgtgttgctcctgcctaggagatgcattccccagaaccaagcaaacaagaagaaggtcctccttcagtgggctgtcatcgatcattccccgttccatggccacaggactgactgctgatgaaatctaaaagaccagcttgcagaaggcatggaaatcctggggttaggggcccctctgctatggaggtatgactcacagtgggtcagggaacctgagtgggatcatccctggaactcagaatctctaagacacacttattggctctctataagcaataacagatggcaagataatattattcttctaatcttttgctaaaaacattcagtcatttctcaggggcctccctagtagaggaagacacctgcagggtatctcattctttcttgttctcattttcccttctaccattttccccttagtatatttctggccctatgtgcaggaaatcaggtagctgaggtgtggtttaagggacccattgtggttcttatggcccatcaacacaattccttcgtgttggcctgcagtatccatgtttgttacccttttgggtcaaggcatgaaaacatctgtccacaatgccagtcttacctctgatatcaaagatagtatctgagacgggtgataaacaaatttaatgtgaaaagctgatgatgttttgaagtcagtagaggacggagctgacaatgagcgtcttgcaatgagtctgttctcaatttcattgctgataaagagaaacagtgtagtgtggtggcgaagagcacagaccctgaagcaagaatccatgggctcaaattctgagtctttaagtctgtggcccaagaattcacatttctaactgacttcctgggtatgctgatgctgctggtctgcaggtcacactcagggtggcaaggtcaggcaaggtcagagcacagcatgggagggactgtgctgcctgtagtacacagtggaaggtggaggaagcccaggggtgacatggcttacttatatcatctatgagttttttgtttcctttaggaaatttactgaaacattcttcattgcaaagtataaaaacaaatataaaatattcaatgggtattagaaaatcaggtatactctgtttacctatgggtttttctagaatggggttaagggtgggaaagtgatgggagacttaagtagtagaagtctatcagaggccccttcagattaggaaatgccctcaatgggcttcagtatcctttatgagataatgcataagtgagtggaccctgaggagaggagagaagaacaagaccttcccctaaggactatacaagacatgtacccatggaaagatggatgccatgatacagtgaccctgtgagacagtactggtggagtcaatatgaataatgggagaaggaacattcacttctgtccactcttctaaatgccatcgtaaatgagctcatttagtgttcagagcagagtaggtattattatttccacctcaaacatggagaaactgaggccagagaggttagtaattttcccaaggctacacagctggcaagtggtagaatggggatttgaactcagtgatacagcaggaggtagacaaatccctaggcaaacacaggtgagtccccagtgaaacccccccctgcaaaccaaagccagtttaaagtctgaaagccaagctacaagtcttggataaatccacagactggattgagaacctctcttcccatttggcatgctttcctctgattaacccccacctcttcacctatacccacccttccccaattggtttttacactgttgcctttttttgcatactcacagaccaatcagtatccatcccctttctgagcccataaaaaccctggactcagccacactgggacacagagactacctgactttgggtggtagacaattctcacgtcccctctctgctgacagctgtttcatcagttaataaaacttttcaccttgctcacccactggctggcagcataacctcattctttttgaatgtgggacaagaaattgggaccctggagaatgtgggggctgaacaaacagtcatggtagctgtgagatctgcaccggagtagtcagggtgtctcctacagtgggcctggacccgagcaatgcttgtagggggaattggcagctgcaagtctgtggcccacagagtgaccaagaaaaactgcatcatcaggactggccacaggacaccattaattaagtgcttaaggagcagtatgggggtgggcagcaacccagggatgcaaaaaagagaggattctcaaccaatagctcctggagctcagagaagcagcccctttcccaggtctggatccatggattgggagcaagttactccaccatttggtggaaggaagcttggaaatcagagggaccagggctaagtcctaggtctgctgtttactatctttgtgaccttatgcgagcctgattctaatctctgtctccccacttactgtgagaaggaagttaaaggagatggcatgtgtaaagggcccatccaacatgtaggacatggcgcacccctaatatttggcagcttgtctccactttgcccattcctactcccaagccttggagtctgagatgagaggtcactccacctggctttagttgggtttgttttgagtccccataggctctctgggactctgctttctgatgggttgaaaacattaggctgttgtgagatgcttccattactgtgatctaaaagcatctaggatgcctagcgtagctttctcactggattgccaatttctcagagaattaaacatttagtgcccaatcagatatttttctatctgcatacatgtggaaatgtatgcttacccacctccggggcgtcaattgaagtgcagttgaagccaactcactaattctccagtgcatggtagaatcttcgtggttggtgaaatgagtcatgtgtatgatttgatggactgtatctatgaaagtagaagatggagaggaaacaaggtctgccataaagaaaagagcttggtatggatgcaagaggaaaaagaagggggaaatataatccttcaaaagtccatcaagtttacctagaaacagatttacttaaaagttttgagaaatttatttctgatgatgatccttatgagtcactatttcttatggaatcaagccagcataaaagttatcttgcattctcagcatagctagtttagagaattaggtcatttgtaagtcaaaagatttctacaaagttcaaaataaataaattccaggtatctgagcttaagatggctgggaagaaggactccatttgaggcaggttttctcatttcccagcttagaattgccttcaaggtctttttctttatctcagaacaacaaagacactgcctgaggaagaacctctgctttattatggtgttctgcaacctaagtcagtgaagttttgattctcctggaagaggctggccagctactcattagctgcagggattgaggggatttcaggcatcagatggaggtggggacagactggagccagagttcttgattccactgcatgttacaaccatctggggagcttttaaaaatgctgatgcccgggcctcacttccattaatggaatcagaacctgtggggccagcgagtgccctaggatttctgtgagcagctcgggctcagaaccacttgttggatgctccctaaggatctggcaaggattttatgagtttaggtttgagagcacctgaaggagtccagaggggctggagaagaaaggagatggtggcttggtaggcacctacatccccaggggtgctggtagagactatgctgcaaaattacccaggaagaagtgagtctttaacattgcagccattactatgcatgaaatggtaattaaaagaccatattttcttaactcaaatacgttgatgagaaagatgcaccattgatttaatacctgctgttttggaggatgcggtgggagaaaactctattaagtatgtattaacatatggactgattataagatctcagtttcacaaatcattttatgttggaaaatgtgcttcttgaaactgatctaacaacataatgatagagtgccttatatggattactctgcctagtcctcacaacaactctacctgtgagatagatgctaacatcctccccattgtatgggggagggagttgaggcacagattgaatagcttattcaaagtcacaggtagtccagagctggtcagtgatgggactggaattcaaagtgtggttttcagaagtagcccacaaaatgtagtgagatccaaggctgttgctttctcaggtctcttaccttccccagagccagggaggtggctttcccttaatcagggtaccgaatctcccaagtgcaggggcgtcctgtccactggctctcatgccctgcacagggtacctggcttaggaagtgaatgggaatgaaatctggcttgaagtcccttagcaggccctgaggccaagggattattttttctaatgccacagaggctcagcatgagctgatggagcccagcccagggagagaagccacactgactgggctgaacagtggacacagcctccctaccacgcctggtggttctttcacctttctgagcacagcatgttagagaatcactctattgggtttgtctgatgatacgggaccagggagaaggaattggagagccttgtagctctggggaccttgatgctatgcctttaggacaaaagcccctacttcccatgccagtttgccccaacagcatggcagaaatggaaaaggggagtgtaggctgaacaggacctttggaaaacaccaggttctgatttccagaccctcggtcttcttgtgcaggctttccccctctttgtttttcccttttctcaaattccttgacgtggtggcaagctgaacctcttagagctgcgttccagaacaacctgggtaatggaaagtacaaaaacaacttaaacttgtttccaaagcttgataggttacaccgacttctcagaaagtgtccatttggacccaaaatgtgaaataacattttgaggcacgttggaggggggccagagggttacgcagctgcaggcgtgggccagatgggaaatccagatgctggcctagggagcaaggtcccttctgctgctcatgcaggctgtcaaagcagcagcctccttaggaccctcactgcaagctttaaaatgttactccttagggagaatttcagatgggagggaaggcttaatcaatacatgcaacgtttaactggcattagaatgatgttttgttttgtttcttttaatgggagatgatgggtggtagtagtaagtcagggagggcgttgcagggtgtggtcttcaactttccccatctttatcacatgccaaaagttgctccatttcagcatgcaaatctaaatttaaatagtcttctggcttttaagaaagccccctagctcacctgtgcagtacgactgaactactatgaaaccagcactggtgaacatatatgtgtggaaacacaacaacaacaaaatcagttgttcaaaagacatatttattattccttcagcagagaggcccatctgatgctctggggcgcaggtcccatgaatgttcagggcagtctctgcccaggccagctccttccccgattgtccacagtgatgatctcttacagactgtcctgcctgccctgcacacaatgggagccagtctggaggaaggtttggtggccatcactctggcgggcactggaaagaactctgctggatgccgagggccatttctctctggacttgctggtgttcagtgtggaagtgggagggaaatcaaatgaggggacctttgggaggtcacctaatgtggtaggacctaaactcagctgggtattggaatcatctggagatttttttttcagttagggtgccccctcctgccttatcaccatagatctgcagtgcagcccagacatccatttaaaataagctgcaagtttgggcacggtggctcacacctgtaatcccagcactttgggaggccaagttgggtggatcacctgaggtcaggagttcgagacgagcctggccaacatgacgaaaccctgtctctgctaaaagtacaaagattagctgagcgtggtggtgaatgcctgtagcccagctactcgggacgctgaggcaggagaatcgcttgagcccaggaggtggaggttgcagtgagccgagatcacaccactgcactccagcctgggcgttgagagtgaacctctgtctcaaaataaataaataaataaaataagctccccaggtatttctgaaggttcaggtagcctttctcattagcccgttccccaggattcttctctcagtcctttttgttgacaagctctctctggtttagcaggggacacaaggttcaattattgttccattcttacgatacaattcttggatctggtttggatataaatgtctaggttgccagtttcttgacaacttcaagggccttgaagttgactggtgaggaaaaggcaaagtaaatgcctgagggatggataccaattgctgtccccaggtttagtcagcaacttttgctgttgctcctgggtctactgtgtgcactcctttgagggccagttatcacacaggtctccctttgggtctccatcttggaatccaggcaggagaaattaaccaggaaattaaagacatcttcccttctccactcctgtcatgtttagatcttgggagtaaggagaggaatgggagagcaaacatagcttggctggagaaggaggtggttttgatcttttcttctccccttcctttcataggtagaggtcgtctcctttataccatctgtcttggggagtagtcacattaattatgcgtgtatttagagctttacaagccttgccaccagacgtgtgtagtgccttacagtttaccaaataggttcacatactaatctcttttgacttagtgagatgatgactcagctggttataaatcatcaaagcagcaccatggaccatgcatgacaaccatggagctagggcaaagctgttacttgaatgaaggaaaatgataaaagcttatgttccctgagccgcaaaagaaaatagccgtaaaatttccattgaggctttttctgttatatctttagctctttaaaaatctcatattgaagatacctaagaagtttggcaacaatgtcctgtagatgaaatgtgggtggagccaattgattgggcttcaagttgcataatgttgggtatggtgaggctatttggtttggctctactcttgggacaagagacagtgggaatgtgtccttgttttgtagttctctggaagccagaggaaggttatgattataaatttaatctctcagttttctctgtgtctcagccttcttcacagggggtaggacctccgtcctcacaagttacgggggtggtctcagcttctggagcaatgaggcaagtctgcaccctgttggatgtcttgggtacaaccagattaatgattcaaaggctgggggaagtccaggctcacaaacggctttcccaaagctccagaaggaactttgttcttctctacattcccccaccgcccccccgcccacacacccaggcattcctcttagattttataatctctttggagcagatcggcaggtaggacctctcatctgtttttttcataccgccatgtcatcagcttgataaatgagacagacacatgctagagtggagatagcattctgtgaagagcatagtgatgaggccagatggctgccaagctcaccccagtgtgggtctgggatggcagttctatccaggagactgctaccatcagaccaactaagggagatgtttttcatacatcagctttcattggaactgatagtgttatggaaaatctgtcctgtccccagcagaatgatcaatcaagggtgatgagcctccacttgggtaagcatggctgatggtcccccttctgacacatgaattagttggttttaaaaggtttacctccatattagttccctgttgctgctgtaacaaattaccacaaacttagtggctgcaacaatataaatttattgtcttacagatttggggggtcagaatcccaaatcatctcactgggctaaagtcaaagtgtcagcaggactggaggctggctctgggaagactctgcttcctttccttttctagcctctagagactgcctacactttttggtccatggccccttcctcacatcacttcttacttttgcttctgttggcacatcttcttctctgattctgaccctctacctcccttttataaagacctagtgattacagtgggcccacctggataatcaaggacaatctccccatttcaagatccttaacttaatcacaccagcaaaccccttttgccatgtaaggtcacatattcatgggttcttgggattaagatactggcatctttgagggtcattattttatctaccacaacttccagtcagtgatttctcggtttatttaccagagcctcagggagcactgcattttgcccttttacaaaattacttttaaagagattaagtatgtacttgtaaaaataaaaaaaagttaatttgtttgaaatcatatactttaaaatatctcttcatccccagtttctaatgccccatttttccttcccagagctgaaaactgttttttttttttttttttttttttttttttgagacggagtctcgctctgtcgcccaggccggactgtggactgcagtggcgcaatctcggctcactgcaagctccgcctcccgggttcacgccattctcctgcctcagcctcccgagtagctgggactacaggcgcccgccaccgcgcccggctaattttttgtatttttagtagagacggggtttcaccttgttagccagaatggtctcgatctcctgacctcatgatccacccgcctcggcctcccaaagtgctgggattacaggcgtgagccaccgcgcccggcctgaaaactgtttattaacaatctctagtgtacactttcagtgagaatctatgcacatacaagcgtatgtgcacacatatatgcgtgtctatgtataattttcccatttaaaaaatgatggtgcactttcacactactctcttttttttttttgagaccgagtttcactcttgttgtccaggctagagtgcagtggcatgatctcggctcactgcaacctctgcctccgggattcaagtgattctcctgcttcagcctctggagtagctgggattataggcatgcaccaccttgctggctaatttttgtatttttagtagagacagggtttcaccatgttggccaggctggtcttgaactcctgtcctcaggtgatctgcccaccttggcttcccaaagtgctgggattacagtcctgagccaccacacccggcctcacactatttcttaatgatctattcacatcagacctatatacctgcctttaaaaacagctacaacatatttttactttgcattggtgtatccaaatatatgtaattgggagccccttatcaatagattgtttcttttcttttttttgagacagagtcttgctctgttgtccaggctggagtgcagtggcacaatctcggctgactgcaacctccacctcctgggttcaagagattctcctgcttcagcctcccaagtagaggggattacaggcgtgtggcaccaggcctggctagtttttgtatttttagtagagacaaggtttcaccatgttggcaagcctggcctcgaactcctgacctcagatgacccgcccacctcagccttccaaagtgctgggattacaggcgtgagtcactgtgcctggccctgattgtaacattgtttctaatcttgtgctgtaataaacaatgtaacagcaaatgcattcttacattggtctttgcacacatgtgccagtgtatctatggggtaaactcctatgaatggcatttttgggtcccaggttatgtgcaccttaaataatgatagttgttgctgcattgccttccaagatgtatatatgaacatatgcttagagaccatggcacctgggcctggtcaaacaccatgctcagcagggctctgccatgttattcactaatagctctggggacatctcattatagttctgcctctgacaaggtccaccctccaggaaatagctcactagttgggggttaagtcaaggatgataagtacacccattgggtgagccactgcaaacctgggcccagagttgaagccaggacaaacatgttcactagaaaggctattcattaaacatcatattccaagctattctgtcaaattctagggacacagcactatgtcttcttgaaaacctctgatttcttttgtctgtccacgttgctggagctagacagtgtcgagactttgatttgagtaccgcagtggcgggctattctgggaggaacagacctgaaagaggcagcacatttagcagagactgcagccacaccggctggggccagggtgcttggatgtgacacagctattgtttgtgaaagagatttgatgcttcattagagaaaaactgtgtacagaaacccggcagagatttcttaatggcattctgattaaaggagcaaacaacctaaatgccagattagtcgcattttgggaaagaatgcatgatggggactgcatttctatttccttctttccctcagccttgcttggcagcatacatttgtcactttgaggacatgagaaaggggctctctgatgtagcagagaaagagctggaaagcagaggcatggaaactttcagctttctggcaggccaaggggaaggttggaggttctgatacagtgtctgcaactcccagggtccagagataaaagtctagacggtccagtggatcaccttggaatgcaaggctatgtggatgtgcatcagtcctttcaccaggaaccttccagaatggttaagaaaggaacccacaatgccccttagagtcagggctgtcatgcacatgaatggttacctcttctgtaccatggcctcagaacatggtagagctgatatcaagggaaccaccgtttctccctcagaaccatgctttaggagctatggttgtcccccccattcttgttgtgcaaactcattaggaggggtagctctctcttagaccttcaagatggggatatgcctggacagggtgaggcattaagggtctctctttataaacaatgaggaaaattccctatacattggccaaagtgatctttttaaatgtaaatgaaatcaattgtaagttccaaactccttcccatggcattggcccctgacacatcccccattgctcagatgcattggccacattggcttctggaggctcttgaagcacaccaagctagttcttcctgggagacctttgacctactgttccctctgcctgccatgctcttctcctggcctttcaaaggtagatccattgcgttcttcagatctcagcagagatatccccttaccagctgatatagctctccatccccaaatcctgccacctcgatgctaatttccttcataatcctaacatgatcaggaactgttcttattcatgtatttgaatgcttacttgcttattgtattcctgcccactggaatgtaagttctaagagggcagggatctggttagtcagattcaatgcttgtagaggtcagaacccagccaggaaaacaaagtggctcaagagagtatatttaatgtagggaactattaccctagcatcagaagagtggaatggctaagtaggtcactgtagggcaacccggaggttgacaagagaaaggagctggggcctggaaggacaaaaagaggaggtggtatcatggaggagacctaatcatggctgaagaacagacaggagagggacaggttccaacttctcccttccttccgccctctgggctttgcccagtgcttccactggccaaatccagtatgatccagttggcaacagtgccagaaaacatagtgggggccgcccctgtgattaagaatagagcaggcaataggtggggaattcatctgaaaacactgaaatgactggtgccttgctctatctccagctgtcttgacacatactaggtcctcagcaagcaattgttggatggatgaattaatggaacgcaccactccaaaggagtcagctttcaggtcaactctaatggagtggatccctaagagggaagggctttgcaggctgggtttaacagtggagacttcctgaggcccggcggggtctcagccggctgtgccttctatctctgctgccctgcccagaggaggatgaaggattcttatctctggaaataaccctctttcatgagccctttaatctgagcctgctgacacttttatatgtgcagggttatgttacttgaggaattcctttgaagacaattttaaactttcatcccttagttcaattttaaagtttgtaacatttgggacccttctcagagccctgaatttactcctggcatcaagatgttcagggcagagctgagctggaggggaattccgcattcctagtgatccttaactggtgcccctggggaatttatctaacatactggagcctccactggtctgtaaggcagaattaagaacaccttgaaagaacatgaaaaaatgaaataaacagcccaagtaaagcaccagcacatatgaggcacttgaaaatgttcactccttttcccccagacgctgggaaatagttcagatgccccctatcccaggacccatgaagcagctcaccgcagcctctctatgttgatttttagatttccttctgttgattattctccacggaaggcgactggagcaaaagaggtggttggccacccattaatacatctccttcttattgggacatttcgccctgctaaaggagtaatcatggattttctgtgaattttcctttaagcgttttctgtgttaaaaaaaattgtagtctgcctaaactgatttatgtgggtaatttatggagtacctgtttttcttttttctctcttcctttttcttcttgctgaggtggtacctttgctgcctcatccctggagttttgcatgagagttgaattttgagctgcaacagtttttcccatttaagtgttagagttgactggtactttatcaaagttccgtaagtacatttcatacaagaaatctcagcaggttagaatccggggactttttatttaaacctctaatgacagtgatactggcctgtaattaaggcatttctggaagttacttcaattgacttgcagaaaggaaggcagaaacccttggaggctggtactaaattcatggggaagagaggcacgggaagctgtggtttgggaggagggctcatgtgtagcgtggggcatatgtgtgtgctaactttcctgggtttctgtctgaattgctaatatgacattaggtgaaaggcatcttgtcaagaatgctgcatgtctggtggacttcctgaatatcaaatctccgagccttctttccaactgcccctcctggccagcctcatgagacactgatgagaaaaatgccacagctttcaaaacagttaacctctcctttggcaattcacagcactgggtttattcaagcttacgatgacacagaattttcctccctttgaaaagtactggttaagtctttctgtctcctgcccttcaaaagcagtcattgtgtttgtttttttcagaggtaccatcagggttgtcagaaagtggaatttcccgccagatcagaatttcttcagccttcattcatgacctgagtacttttggttttgagggacaaacttgctctattttgagcactgaaggaaaacatctaactcccaattatgggtctgtgcacgtgaataattgggtaatgggattaaagtgcttgaagatacaacccttcctcaggtgccccttttcacacataaggaaagtggagtacgaagggcactggctcacgggaaggagtggtggggaccccaggccttcagtccctcatttaacaaggttgtaaagtctgatctgacttcttactgcaagcaccgctacttctatgacatcctccatgccctttttatttcaaaagcagtttaatatgttatttcatttaatctccactgcaactatttccatttaaaattttgttagataatcaatagtgctctaaatatgaaccaatttggaagaaatatgaagaaaagtcatcttttagagacaacccaattcatgggccttgtaaacatttttattttttaggtaatcataaaataaaattgactttttaaaaaaatttggtgtgtaggtctatgaattttcacaaatgtatggaggcgtgtaaccaccactataatcagtggaactgtgcctttaccgcatcgaaccgcctccttccatctctaacccctggcagccagggatctgtttttcatcaccatagctttatcttttcaagaatgtcaaataaggagaatccacaggatgtggccttttgaaactggtttctcttatgggcttactttttttttctcagttagaacttttatttaaaatcaacaatcaattgaacttgcctatttgccgaacaatatctacaggtagaaatttgcaagaataactctggataagcatagtaggccatctatttcatcatgaaggaaatttttgatgtactattttgaagactctatttacagtcccttatatttaaactatatctattaaattagtgttatattgaaatagccattaaaacaaaacaaaacaaaagtcttacatggaccaggcacttgtgaagtactctattatttcatttaagcaaatatacatcctttatgggtcatctgtgtcattttgttatttactcctcttgtacaagcttggcagggtttgagtggttctttaaaagagaagttggtgatagggagggaacttcatttctgtcccagatgctgacaccttgtgggcccttggtaacttccgctgctgtccatttccctcatgtaagggcagatggcatttgcatacctggagggacgccggctggagttacagatgcctgctgatgattggaatgttagggacttagtgacatgtgctgtagtcatggggtcctctcagacacttagggcatgcaggccttaggggagccctgtgcctttggggctggctgatgctggggagtgggactgtctgctgggttcaaggtggaaagggaactgctcctgtgtggtttgcctgccaaggagctaattaggagaatgggtttggtgatcttgatctgacagccaatgggagacttcctggggagctggaggagataagcctgtcaagaggctcccagctgtgttagggccaggattgtcattgctgctaggcagggctttggtcctcccaaaatgagagtgagcagattgcagcattctttctcatagcaccaaggaatcatagactccatggctaagtgaggtggaaccaaccacattgtgtggtcagccagtgccaacctttcttcttgcctggccttgtggatggtgttcacttttgagatgcaaactccaggttatgttatgaaactccacttctttgtctctcaaaaaaagcttgttaaaatgcgagtatcagtagccttttatttcaagcctcagatctcctctaatcaggccatcaattggccatactgatagctattattaaccattattgagaggcactagattatgaagagttgagtagttaaaagcagcatttctggagacagaccacatgattcctagtctcacctctgcacctggctggctgggtgacccttgcatgttgtcagcctttctgagccttggttaccccactggtaaaatagggatgataatagtacctccttcacaggtttattgtgaagattaaattagtcaatacatgtaaagctactgacagataccagcctttggttgtaagttaattttgaggattctatattcggccacctctgctactctgtcatcacattcagattgagaactgctgatcagtctaagtctcacagggaataaagctgaggtctacaaaggctcagtgatgtacacaggcagaaccagaactaggagtgtccctggacccttaatctcttcacactgcaaagcagaaagctggtgatctgaataaactgtttgctcttggggactttgctaactagaaatctttattaacttggactctgattttattgtcaaggcaagaataagcaatttttagatcaacaactccaagtcactggagtcacttcagcagagtttcagtgtttagtgtgatttgctgtgcccatttctctgcataatggccttccatgcatgtatgaggggaagtccatagttaactggaatgcatgcgtaggcagagctttttgtttgccaaccaggagtgataacggagtttattgccacttgatcccctctgccagcccatctgggtcaacttgtttttctctggtgtttgccctttccatcaaattgttccagagactaacaacctggcttagtgatgacaagtgtgttaatagtggagctcaagataaggcagcagtaactctgtttgctctgagagtttgctgcctgcctgctgagtgatccagggacttgtcagccctttgagttaatgtgtgtgaggtgctggatgcagagaagagcacttggtgtgctttcagcttgcacatgtgtcttggtgctcagcactccccatcccatgccaggaaacctctctctctctctttgcaggagatcctcatgccaactcccatctaaaaaatgaatgcttgtgatttggaaatactttttcatagatgctcagaaggtgtttagagttttggcttttgcttagttcacaaaccaggtaattcccagttgtccatatgaatgctctatagtcaaatttaggatcccaaattggcttctttcatcactgagcaagcttctggactagacagtctcttctgtaataaaattgctaaagtgaatgcaacaggaaggagaggaggaatttgcaatgacctctttgtgtaggtagatagtctgtgctttcctgatgcaggctcccttaacatgaggattgtgtatggggcagtgacgtactgcttctgaattatccatgcaaaatgtttggctctttgagtgtgaagcagcagcagttgcttgtattttcagacaagggtctcagtgcacggagaggactccctccaagtgttgtctttgcatttccattcatcttattagagcagtgcaaaccctgatgcatgaatgaactgggtttgtggctgaatgagtttggatttgctgagcaggctgattcaggaagttgtccttgattcccctgctgtttcccatgtatacacacccttcctaagtgaatgtggcatttgtattggatgaaggccatagctcagtatgaaacgtgattatatgtctactctaatcctcaacaggcaatgctttccacttagggtgttttagaggacatgtgtaccattggacttgcatgatatttgggtcaaaggcatttatggacagagatggaaggtatgatctatcagcttagaaactcaacctcaagagagaggagggtgtataaatgaggatgcataaagtaagaatggaaccccccccccccccccgcacacacacacacaccgtccctagtcaaatttgcaaagacttacggatatgctaataagattgctgctggctaggggaattcacaggtctgcaaattctatgaattctaatgcctcactcagcaattttaaaaatgaatggactggaattaattgggagcctccttccatgggaattttggaagtattcttaggtatcacagaacactgtctgtttatgcataaaactccataaactacaatggaaatcactctagataacaacgtgagagatgggtattaccaggggcatatggcgtaattttaggtggtggcctgacccagcataggatgacacagactccaatgaggagagggttatgttttcttttacattctctttaacacagagagaatgtcttccctaggttctaccaggtctttaacacctctctaaactttggcaatcagcctccgctctcaggctctgagtctttgttggggtgacaagatcgaggtggcgtttaaatgatctgggttttcttttttgctgtatgtttagaattaccttctagttatagcaagtgagatgggctttccatttgtggtagtgaaataaagttcaatttaaaaattgaactttaaagaatgagatttaaagaaaaaaaattacacaattaattgtgtaggtagagtcccattataaatatgttgtcaggacaggacatgagtgatagagataaggaaaccctggcaataggagataatgactactttgattacacagggaggcagtaaggactggttcctccttcatcttgtaaacatggccactgtttccaccaggggaatactgatcgctgtcctttacagaggcactgtgctaagtaagtacttttcacacatctcatctaatcatctgaacaacccatgaggtatgcataataacaaacctcttcctttaaagatgaggaagctggaacttagagatagtaactggcttttccaaaaatacatggccagtaaggggcagaggcagcatttgagcacaggcaatttgactccagagcctggcacctcacccctatgccatgtggtaacacccagtaacagccccagagaaatctaatcagagaaaattccagtcatttcagtttactacctggggcaaattgagtttatggtgggggaaaagaaaaacacattttaaagaagggcaaaacaccatcctaaacttaatgagtcccatatgccatccctatgtaacatcttaattttcacctgtttcagtgtctgttctatttctctcataccactgcctgtagaaaatagatgcatgttcttgaaattcctactttttctcattaaaggttagattttattattctttctctcaaagtttggattgccaaagcttttggatttggaatatatttggcttgcatagatgccaatatttatacattgatacgaagattaaaaaaaaaactttagaggagagatccttttacaactagacttgatttagagtctatcagaaattttcttacatatttagcataagtattgtgagataatgtatgctttctaaaaatatacatgatgttctgctcagtcgaatgcatttatttctttctttaaagttttctgggtaaatttcaagagcatcgggatattacttaacttggtagattttattaaacctccaaagaacataattaactcattttacaaactgttaatgcttacagaaattcatgataaatgagatcacttaagactgtttcgggagaacaggaaaagccagtttgttaatgctggtcctcttctctattataatattgtgagaaatgaaggaatgtttatcactagctgttataaccttaatttgagagttctttaaatggcaattacatatatttacagaagaatgacactggcatttagctcaatattttcagcttaacagagtctcgttgggcgcggtggttcacacctgtaatcctagcactttgggaggccaaggtgggaggatcacctgaggtcaggagttcacgaccagcctggccaatgtggtgaaaccccatctctactaaaaatacaaaaattagctgggtgtgatgccatgtgcctgtaatcccggctacttgggaggttgaggcaagagaatcgcttgaacctgggaggtggaggttgcagtgagtcgagatcgtgccactgcactccagcctgggcaacatagagagacaccatcttgagcaataataataataataataacaacaacagagtctcccctgaaagagggattataaaaccagggcaagcctgtcaaagagaaatttgatttggttctgctgttttacattttaatatgcctgtatgatgacctagcccattaaattttttttctttaaattatcaataggctgtctcaacctctgttcaattgaattttactctactctcccagggaacaaaatgacagagcattttgttctaggtaccttagttcttgttgcctattgtggcagctctatttccagtacagagtttcataggaaacctctcttcttctggtcatgcctatcacccagtcacctttcctgaacaattaggaattgactttctcttccccaatgctgcatttcactctcaccctcagtgtccagccctggtcatattgtctttagcccaatttttcaccacgccatagtctttcttgccactgggctttgcatgtgctgttccctctgtttgcacatgctgttctctctttctcctcttcttcccatccctttcccacagcacacgcctttcacccaaatagcacctactcattcttcagatgccagctccagtgcgactttcttgagaaacttcttttcaccttgatcttttgtgagcagctcttctagaattgtgttatgttcttccatgcccttatttcattttgggttcacattcattggggatgattatgaatggatacctgtctcccccattaactgacattgttaagttccctgaaagcagctactatctgttttttgtctcagttctatcccagcacaggatgagcactccattaagtatctgcagtatacataagtggacagaagtgtttgtaaacacccacgttctgccattcttccctcaatgccaaaggatccaactctaccacctcatcaaattcagagacagcttctgattttgagccataggggtgtcaacagcacaagtgcctgaagggcccacagaattcctggcatgtgctgtactttatcaagaatctgacagggaatgcggctgtccctatcaagctgttgtgcctgacaggcaccatcttggttagctgtgggaccactggtgtttctcctgaagctgcaggacagccagctgcaatgggctgactgatcttgaaatgaaaccctgcctccttctccctcctcctcgagccagagtgaggtggttttaacttctatctagacagttctgagattggtagaggagaaaatagaaagttcttacttaaattattggtgcagaaagaagaaggtgtatgtgaagaaagaaaatggacatttactgactattctgcaacacagcctgtgcagtgtgttaggatacacacccaacatctcctttaactcatctgttgccgcagactagtcaatgggagcaccaaaaactaggtaaaggctggtagttgaactaagtctgtttggctccaaagcttatgttggcaccacaacttcttcctaagacgaaggttggccttcactggtctgactcaaaagtagagaacatttactctgccagaggcaggaacatattcagctagcttcaggggtcctggtgctacaatcacttgtgtttctttcttttgtttttttatgtcaaaagtaattagcaaagaaattctgttttgattgtttgttttagagatggggtcttgctatgttgccccggctgaatttgaactcctgggctcaaggggatccttgtgagtagctgggactacagagcacaccacccgcccagccacctgtgtttcttatcagagcttctatctctttgttgttgcagattggagcctgggaggctgggggctggggagatagtcaggacccctagaagggcaggaaggatgcacaattattccacagaagaagcctgcctctgtttcccttgatgtcacctagtcaacaaagtcccacagtttatgagtttaacctacagaaattctaatatacctgccctgcacacattctgctatgagagccaagggattaaagatcaacaaaggcttccgagaagaatgcttggcttgagattaggaggaagaataagagtcatccttcatccatgatgaaagaagactggtgggaggagaatgggagagaatgttgcagataggagaaacagaatttgcaaagtccacgtggtggcacagaggaaggttcacctgagtcatggaggaaagtgcagcctggctggggtgtttagggagaggaagcctgatgccagaggtcaaggccatgacaggtaccaaatctgcccccacacattgttctctttccatcctgttgggtaaaacatacagatgtgagagatgggatctaagggatgggaggaaagtgggaaaaagctggggagaaagactaagtgatagttactaaaaataaaatttgctaagagcatgttttaaggatcgtggcagaaccagtcagtaataagggttgaaaaacaaagcatgaaaatgaggttaacctccctgttaacccaaactgaggtctccctggcttttattatcatggttatcgtaacacccagacacatggattggagtgtctggggaaatcccttcagtccgctccccaaccaccgcagctgtaggaaaccactaatctactttgtgtgaacctatttttaggtttctatagatttttctattctgagcatttaatacaaattaactcatacagtatgtaatcctttatgtctggcttttttgtatgcagcataatgattgtaaggttcctccatgttgtagcaggtatcagtagttcattcctttttattaccagtcaggcacttcttgactccctgaaaagggcatcccatcataaggcagtcaccggttcccaggcatggctggagcagggtgccatagagttagtgattttcctcaatcgtattggatctcagtggtctagataaagtcagcccggacacagccctctcagtttctctcatgccctgcttagcagcagctgttctctagctatatatccctgttatggttttgggtcctgggtcatgagtggtccttccattcatggccaccatgtacagttgtataggttgagtactgcacaaaggtgcccagctgaagaaggtacaagaaagcactcaaatgcaacctgtaccccttttgctaagccagaggctccagaatggtgctgtgtcagccagaggggagagtactttttttctaatgcattcaaggcttcctaagggcttcctaagggcagtcctttggatagcatgctgttgtctgtggcacttgccagggctcaggtcctggatccagttaacatgtcttatatttgagttaacaagattgaagtggtaggaagatagaggataaaatcacagatattttctgatttatggatttgttctcataagaaaatcttttccaatttgtgttcggagatctacacccctattttctccatcagtcctcttgtgagttctaacatctcttgctgttcccatctgtgtttctaactttgaggttgagcatttctgagattgaattggtattaaaaattaattttcacaaaagaagaaaatcatgactttcagatatcaaaatgaatatgtgttaaagattttattctactcctattcaatgaggggaccaggcagatgttataaccagttgaggacaggcaggacatggtggctcacacctgtaatcccagcactttgggatgccaaggtgaaaggatcacttgagcccaggaattcgagaccagcctgggcaacatagtaagactctgcctatacctgaaaaaaaaaaaaaaaagccaggcatggtgatgcctgtctgtagtcccagctactcaggaggctgaggtgggaggagcccttgagcctaggaggtagaggctgcagtgagccatgattgtgccactgcactccagtctgggcaacaaagggcaacaaagcaagaccctgtcttgaagaaacaaagacacaaacataaacaaaaaagaaaagaacagacacttacaggtcagtaatatttaaatgaatgtggaaacagaggcaaaactgtttttttccacaaaggcaggagagaagtcaatggaacttctcttggacaggacagaattttcatgtccatggacaggaattatttgcattgctgtcacttatgtacaatttacagaattataaaataacttctatatggtcagaatcagcttaccaagagtggcgttctctggagtctgtcaatgcatcccttgtagcagcatacttcattttcccctgcattggtaatttgtggtgtttctagcgcattgatgaacctaggtaagtttttaccattccacttgagatttcaagataagcacaccatttctttcatgtctgaagtagtctttggtatgttggtgttctctattagaggaggaaggatctggaagttttcaaaggaaactggtttatggaaagagcaaatggtggggatgtactgtgggttcgaagggaggcatgtgttagtctgttttcttgctgctgataaagatataactgagactgggaaatttataaagaaaaagaggtttaacagactcacagttccatgtggctggggaggcctcacaatcatgacagaaagcaaaaggcaagtcttatatggcagcaggcaagaaagaacttgtgcagggaaacccctccttataaaaccatcagatctcatgagacttattccttatcatgagaacagcatgggaaagacctgccccatgatttaattacctcccattgggttcctcccatgacatgtgggaattgtgggagctgcaattcaagatgagatctgggtggggatatagccaaaccatatcaagacacctggtaggccaccaactgggaaataaggtctggattttattcttaaaatcatcacacccttgctgtgtgacgtttgggcttggcatttatctccctgcttctgtgagacaggaaaataagtgttatttgtaaagtgtgttgaggttccctgatgaaagttaccagttaaccacaaagtagtgttatgaatctgccctttgtccgcttgctgggattggatgccctgggtacatttgtcttccacatctttcatctcttctcaccattcacttccgctgcagcaagtgggcaccctgccatgggcttacgtgttttcagcagctgcatttggatttttctatttacccttgaaacaatctgttataaaaagccttaaacatctcccagtttctttcctttcctctaaaatgtttaagtaaatagttgatggaataattattctaaatgtagtagagttcacattgtcttaaaagactggctaaaaataaaaaattggtcttgtcgaagcttaatgagattcttcagctttgctgtcccagtgctgcaggtggtgaagaggaaaatgctggagcttccaacaacaacacaccccccaaaaacctaaaaacaaaaaaaagtgtggaaacacttccaaaatctactcatctaaaatggactattcctattcatcatgaggggatcttcaggtgtattttcagtctatgaggaaaaagccacttttacaggaatgtctgtaacaaatttgtgatgtaatacagtgtctactccagtagcttcacttcatgaaactgaatagcagagggatggataatagtagctgaaagacttatttttccttttagctgtgacgctttaatgactttgctatccctcaactgtccccttgggtggaggttatattctttaacgaatcgtcatgtgattcttcacttttaccataccaaatcctatatactttgctttaatttttgctttgcttttggtgaccgcatatggcagagaaaatattttttgtcttcactgccattacaaatttccatagtcctgggttgaggctggatttcggagaccaccttgtttttttccaaatgcaggagagaggaaagtagtattagcagcagttcaatccagtgcacgaaatatttgttgcctgttgggatgcaatactacaactcatttacacttcacacatttatcacttttcttacttttgatagattatcttcccagccattctagccaaactgatcatctgcttctgaattcccaaggtgtttaatatctttcctactgatatttccatttaaccatatggaaatggttaaatggtctgatatggttgtttgtctatctgttgggcatttattttgtctctccatcagaaaaaatacattccttaaaggagagaatcatattttatatttctgttttgtcctctatagcacctatcaggtggccagagtcatagtagggtctgagaaaattcttttccatttgcttaaatgcaaatgacattgggtaaacttgtactaagtgacacagattgtcacaaaggtctacaacagagcatgctgattatatacatatcatcagaggacagacttgagaaactcagcatgctcatttttggatttgagctgcatgaacagctcttggtattgattaatggaaagatacaagcctttagttgtttggatggaaagaaaacatctctagcattcttttttctttgaactcttagaaactgaaaagtcccaacagtccatgtccaaaggcgtaactgcagacttcccaggcagctttggagatcatccttctccaattgtggtacttggggtcaagtgtagaagcagggagaccacttaggaggttattgtaataatctggtgaaagaccatgacactttgcatccaggttggggcagtgggagtggtgagaaatgtgatctgttgcatcgactttgatgtagagtcagttacatggagaagtgattggtgattccagaagttcagagaataagccccctggggaaggtcattttcagtgaggaggtcattcatgtccctgaaagtcagttgtctgtggcagagcttgggtgctggtgcttttgctgtggtccgtcccagcttctctggcaggttggcatgtggactgggtgttggagaaactgctgaggtcttcctttccctggggaggtagtatcaatgattcggaagttttaaaaatgcatcagcttgctggacagtgccctcaatcctggcccagacccatcgtggaaaagctatcatggtgcagcctctgcattttgcattagttgacctctttatggtaaggggccaagtctgaaccccagggagctgaggcccaggaatgctccttctcattagagtttggcctggaggtatggtcctgaaaactttgcaggtgagccctgttagtggctcctcaccccttcttctcctcccttgaaggagggagagcttcccccaaccatgctgggaaggcaaagctctcttaaggcaacgaccacttgctgagcacatctcagggcagagacaatgaagagaaggcatgaaccacacagccagctgacatctcaggaaggtgtgggagtttgaagaatccccgctgtgtgtcatttactggctacaggacattgggagaattacctaacagccctgggcctcagtttcctcagctataaagtggggataataataatagaactatcttctaaattttttgtggggattaaatggggaaatataagtaaaatatttagaatagtgcctggcacaaaatatgtaccatattttgtttgctattaatattttatagtattattcatttataatatgataggttatgtagtgtgtttggctattataaatatattgtgtgattagtatattctcaagccaggcccagtccccagcctttagaaacccactccctggggatctggttcagggtagttactgggtcaatctgtgtatgaacaaacctcacgcataatacagacatctcgaattgagtacctgctgagcctggatctgtgttggtaacttcacatccatgatccacaaatgtctgacatttattttagaggtgaagaagttgaataccagagggttaagtgacttccgcagggccacacagcaaggttaaaattaggtcccctgacgccaagcccctctctgtgatcaatgagtgtttcctgatgtctgcagtatgccctttgctgtgggaggcactctaggcagttattcctgaactggctcaagattctgagtttgcaagtcagggattaggcctaggcatctacctgttagcaggcccctgcaggaacttccagagcagatggcctcaatggcccaatggagacacaatgctagaaggtagacgaaggatggtctcagctcctgaggagtcttattacagaggtgatcatcaaattacatgaaaatgcccagcaggtgctgattctgtgcgtgtctgtgaggctcactctgagatgcagcagcctggttaagcggagaggactgtggtactcatgttgactcagcttagggaattaagatgccctgtgaatgtggagaggtggggcaagggcaaggaaggggggacaccgtttgaggaaggttcagaggcataaagaacttgacatgggacagggctggtgaggattccctctgggacatttcccccatcttcctagtgaagacccatcctgcaaaatccgtggatggaaagcagcgggcataacctcccagggtggattacataactgggctgggccttggctggggctgggcctcccttgccatccttttctcctggttctcaggtcctgtgctcctctcatctacctctctacctcctgctgagcagtgatggtggagcagggcaacctgctcacaacttcctgcaggagtggatgatgtgcatgtgttttgtggggtctgttgtagtcttatgtcttttgcctgtgagtggttaggccagctgtgccctcactaggggagcaacaattgggactatggcaatggaaggcagaccctgtgggcttttggaacttccttctttttcacccatcctcctaattttgcttctgtccataacacacaatagggcgttggacaagtcaattcctctctgggtcccagttttctcctctaaaatacaggcttacgactaggtgaccttgcttccttctcaaagtaacattcaatgacttttttgaacccaatctttggaacccctcttggtgttctgttcttttggctttgagaaggcttcctcctcctgtattagacagatactggagtaagagcccaggttttctgggtacattttcctttaaacctccaggcaaactggagctagtcaagacatcagaaagagtatcctgaagctcagggttgtgctttcagatcctacctcacaaatattcagttggtataggctctctgaggtctaagctgtccaaataagaaggatctgccttctgtgtggttgatccagttgcccatgaaggagactctgaaaagaaaagcccctccacactcaagataatgattgccaaggttttgcactaaaagcacacatctgcctgggactttatgagtgatggctgtgtgttagctgcaggaggcaacaggaggcaatctgcccgaatggtggacaccatggccagccaaggctgccccatctcggtcttcatcacttcccttctcagtttctctccccacaaaactcaccatgagatggcttctgcggcagtgaggtttaccatccaatagaaagaaaacccatggcagttggctaaccgaccaaacttactccatttcctctgacaatcgatagttattaatcacctacattctccagaaggctgtaaaccgccctcccttctgtgtctctgggatgacaaatggagtcggggttagccagcccggctttgtggcatccaatgtgtttgtgtttgtgctttgggcttgtcagttgcctttgctgggatgaaatagtggggcttccactaggcatggttcagcagctctgctagtgtctgtgctttattgggcaataaattaacagtgagcactgccaaggaaatagataaatggatagggtggcaagcacatttttaacaaggaaaatggcttcgtttctcagtagcatcatttaaatgattagctcagttgtgtagtttccttgattaggggatggggaggagatcttaaataaacatgtctgtaggaagaacattgtgggggcatcctcactgcccttctttggaaggtttagggaaggagaggggatttgtttaggaccctaggtctgggagagtcttgcattttagtcatgtgtgatacatgactaattctgcctgtgggttaagcctataaatagtgtgtgattctggctggccatatctggaggctataatcaggatagtcatacttgaaagagttaggagaaatcttttatggcttgtcatgatccttaactgcatccccatggtaaacagtggcaagagggaagagagggaactctttgtttgcaaggcaaatctccacaaagctaagaggaatgctagccatcagtacaaaggaaaaccttccaggctcaagagaagggcagtagaaaacaaaaacatgaatgcctcctttccatgtatgtacacgtaaacataaaagggtgcctgctttttcataactaatttctagaagtggtgccttccccactagaatatcatctgaataaggggtctttgtcatgtgttctctgtgatagcccctgtgctgggaatggtgcccagcatatagtaagaaatcaacaaatacacgtggaataaatgaacttacaggtggactgctttccaccctccaaattctatccatgattcctttacagcttaattacacttccaccaggtccttccccagccactcctgcctgaaggactgtcctctcctctgctcaccagttatctcttcttttcctttttattggaaattgagaccttgttttggaccatgttttctattgtttcaatttgacattaaaatcttatagtattgatctcttttatatccattccacaaaccttttcaggttgctataaaattttttatctgtgtttctctaggaatagatgagttgcctgaatgtgaattcaattcatcttgcaagtataatagcttatcataataagctcttcatgtaatgtaataagtacttcagaaaataatttagcctttactggattttttttcccttcaaatgattggtttgtatgcttaatcactcaagaactcagctttctggtagaaattgaacttgtatttgcctgtgaccaacctactgatttttgttttagaaaaacagaaacaaagggagaataagagagaggcaggaggaaagaaaatgagagagagaaaaaagatgaatgtatatttacatctatagcttacttcacaataggttttgaggacttatttacagctaccttatagaagatatttacaaaaagtaagtgctataggttttgaaatcagagaaaagggtagatgaatagatgcttctgctttagggaatgtatcttggtaacttctgataaaggaagctttttaagctttctcttctctggcgcttataataggtccatgttttggtagggggtctagaagaaatagcagctctttgccaagggattgcttattggaacaaatcatttgcaatagaaatgtgtttactaagataagtgccattttaaatgtagtgtgctgtacccctggcaaggaatcttaaaggtgactcaaagcctttttgaaacactgccatataattaaagaaaaccaacttaatgatctaacatttagcattattctttacagttttacacttggactggaaaacagttgcaaaaatagcttcatttaattaggatgagaaacataatacacatatatagatgcatgtgtatatatatatatatttacttcattttaaaaattattatttgtagaaatagtctagtatgtgtgaccaagaaaattaatttaagatttgtgctttattcttcccagtcattcatcaacaagtattcattgaggatgcaagaggacctcaggagggatgtacattcaagacataccatcaaaggggcttattgtctagttggggagataagacatatacacaaaaatagttaactgtatgtatcaagtattatggaattgactgccttcaaaatatgaaagatggaaagtgctttggaatatcaagcaaggggaaataggaacctatactttaaggagggtattcattcattcattcaacaattgtatataaagcatgtactgtgttctaggtactcacacctgggtgctagagatacagcaaggactgaacagaccaggtctgtgtccttacagaatttattttcttttgaggttaggcaagcaatagacaagtaagaagtaagtcaacaatgtgatttcagggaatgataagccaatgaaggaaatgaaacagtgtgaggggacaggccagtgctgtgtgcacctaactgcatgtacttgcttgctcacaactcagtcgtgctttagaaaggatagtcaggaaaggccttgtaggaggagctggcctggactcagacctgaataaggagaaataacctggagaagggatggcattctgtcctcaccttggagggtcaggaagatatggtttggaggataggaaagggacagacattctagaacatttcagagtatctgagctttttttttcccccagggtgtggggttgtggtgttttgcatcaggtaaggctcaggtgaatcaatgtataattttggcagccagaaggctgggagctgttcacaatgagagattttttttgcatcttccagtaaggccattctgggatgaaagatgtcagagtgtctggcaaccaactggcagccattgaactggggatttatttagcacttacttctagagagcttgctatgtgccaggcactgttttgagtgttttacaaacatattaacttactcaatccttacacctctttgtggtagatgctcatcttcggctcctctgtcagaggcaggaactgagccttgagagttacctgctctaggccacatctctgggaggtgttctagttatgctgttctagcccttaactcttgtgcttcttttttgtgagacgagagagcacccatgtcactcaggacacttctaagtgtctctagcctggaccagcagaatgagagttgggaccttttctaattatttaagggatctaaggactttccaccctgatggaaacattctcagtctgcccagtatggtacccacttgcaacatgtgcccattgggcacttcagtgtagccagtgcaactgaggaactgagtttttaatttgtgtttaactttaattaacaaaaatataaacctaaaaactgaaggaatataaaatgtttgtctgttaaacaatactttgttgttttggtaggactaattttcacaagatgcaacaattgttgcaacacatgaaacactgttatatttcagtgggggtgtcaggtgcatgaagtatttctagtatctcattaggaatttttaatattaatgacatgttgaagtaaaaatattctggatatattgggttaaatatgaaacactttacacactaatattatatgtttcttttttttgaaatgtggctaactgggacattcaaaattacaaatgtggcttgaatctttgaatatttctattagagggagctgggatgaagtttaccctcaagcctctaaaaagagcgcttgggccaggcacggtgcctcaacgcctgtaatcccagcactttgggaggccgaggcaggccaatcacttagtgaaaccccaactctactgaaaaaaaaaaaaaattagctaggtgtggtggtgtgcacctgtagtcccagctacttgagtggctgtggcatgagaaccgctggaacccaggaggcagaggttgcagtgagctgacattgcactaccgcactctagcctgggcaacagagcaagaccctggaaaaaaaaaaaagaaagagagagagagagaaaagaaaagaaaagaaagaaaggaaagaaaggaaagaaagagagcttgaacaaagaggaaataacggctgtgttttgggtggacattgagccatcatcctaagcaccagttctcccggacttctgggctcttgctgagctcactccagttcccagttccccgggaccaacatgcaccactatttcttgggttttgcagatggaattgccacatggatagagattggtgggaactcatacatgaacacaacccccattttgctcaaaaatggtgtggatttagttggagttagagagtctctcaaccatatgtgacttctgccttctgcccttgcctgttccttgacaaggaatgaggcctgcattgccactggcaggaagcagctatccacccagcacaatgcttgagggccaaatcctgcacctggtcccagaggtgcccaaaagcaggaggtgagagggctgtgcttgcttgagggaccccacagagccagggaacagcctgccaaagcaactcaggctactgaaatccaagtggcagcaaatggccaatcattgtctgggtctggctctgtcccagcctctacttacctgtatctcctcagaggtacagcttggggcagcctccctatcaccgtggtttcaaggagaggtgtgggtttgtataggggagatggggctcctccataactgagtcaactgaagactcctccagggtcactcaagtggggacattgaagaccaggtagctgcccacttcgccagtgcagagacctgagtcccaggcagcccagatccctggagatagtcacatgttccatttgctctgctgtgttagcattaagatcccacccattggctgttcaggtggccacggccctgactgcacactggaattacttggggagctttctttttctaatacatcagaaaaatactgatacctggtcttccccacagagatgctgatgtaattgctctggggtgtaacctgacaatccaggttttaaaaactctgaatgaagttatctttccctgagaggatatggtgcattgaaatgaactttctcaaagtgcttcagaattacagcagatgggggtgcagggtgcctgttgaaaatgcagagttctaagctgttcatcagacctttggaatcagaatatttggaaatgcacttgtaacctacagcccaagtggatattcagtaggctgccatttcaacatcaccctgtgaaatcattaacaactcagtatggatttgctccttattccttgtgctttttaagaagtccaagaaagagagttaaggtaaaattgaaaggaagtaatctctaatggtgaaatttcaggctcttagatagagaatacttttcggggaaagggggtcttctagaagcccctgaaatgaagacaaggagtgaccaccaactccttgagccagaactggggcagttcttcacttggggactctgcccttgtgcagtgggaaagcagcttatatcaaggcttggccaggcctcctttggtcccaggctggggactgctgggacttctgccacaagatgcttggattgtgtttctttgcattggtgcagcgtctcctggagactgcttttgttcagtcactactgaggcgtgtattcattaaatcactgtgcgcactaaggtagcagtgcagagacaccctctctgtcaaaattgagccagcccatcctgcatggtcttaagttttcctgagaaaagtagccataagcgatgggctcccactactccctgctttattacttgaggtacagagagcatatgacacattcgaaccccatgtgagttagagttcagtatgggatcagaggctggtttactcttttcaccgggaagcgatcttgagaagcctgcggatgccacttcccatgacctgaggggctgtgttttatggactgcttttgatctgaaatctagagatccctgttttcatccttgtaagcctccagtaactcaatcacagtagagcagtccccatcatctccagcaatttattaatcatgttcaatgccagacaaggccttaaaaaaacaacacttactcatcagcagaccactagcagcatggaaatgctactggcttctctcggagaatctcctatactctgcgaacagcatgagtgtctgtgtgtgtgtgttttagtgtgtgtgtgcctgtgtgtaggcacagaactatggaggttttagacattgtcgttcgcctgctggtatatcaggttactaaacagagaactagaaactctcctagagtggctacaggagcactgcagattctcaactgtgcttccccatcttctcctggatgtttggcagccagtgtgtcaggatgtattaggcctctctccaaggacccaagtgcaacttaaattggatgaccatattctttggcatctactcagggcacttgtgagagtggaaaggaggtgctcttaataattattccaggacatcaagcaaactgggaagtagagtctccttaggcatattcacttggcagggtctactgtcaagaagcgtctattcttggcttattaaaatgccatcagaaatcagtcagcattctgatataacagggaattccttttatggtattcttggcaggtgatctcctgtgtcaacttaaatgtccccagggactgaaagctcagtgccacatgcagcagccattctattgttggatgattgtcacattagattgggactcattagaagacttttctgatatgagattggaaaatatgctaataatatgtacagtgatgcaggcaacttaaaattttcttggagagaaagagagggttgctatggtttgggaaaatgagtggggccgatgcttaccctttgtgaacccatttttggagggtgcagccatcacagcgatccaagaaaaatcttcctgccttggatgctctttcaccaaataactctggaaagctgatgagatgaaacagagtttcacaagggaaagtggagaagaagtttctgagagacaggaggatttatacccaccaattcaggaaggagctttggagtcatggattaaaagaacaaaggcagggagtccgacctggatttgagactaagctctgcctcttatacagggcatttaagctctctgggcctcagttgctccacctttagaatggagatgcctcttcctttttgaagacagtgggtcctccctcaattgaattcagtgggacttcatcgcttgctccacacagagctcctccccagtctgtcacattgagtgcaaaactctgcctaggtccatccagtcactcaacaagcatccatgggggaagcattaaggagctttagatgcactgggttctgtgagagcaatgttagtcttcatcttcttcactccttctcatcctccttccatggaacacccctagactccacagcctgcaaagctcattgccccttctctggagagtcctcctaattcatgtgcaaattttactcactagtggggtcatttgttgagtgtctgtccctacttcagactgtaaggttcatgagggcaagggctgtggctctttggtcctctgctgcatattcaggcttagcacaaagcttggtatacagcagtcatttaataaatatacattgattgaataaatgaatgagtgaatggtggggccacagccatgattgataccctttccatcctcaaggaggagatcacagacaagagactcagaagaaaactcatgactacaataaagagtaagaagtgctttgtttaaagcatccttggggtctttcaagaggtcccttgggtgaagtagcagattcagggtaattagggaagcctaagagttgatctttctgtgcctgaatggattgattattcaatagaagaaaagaaaagaaacaacaagacttaaacctattcaactaccctgtgtacttgaaatgtcatttaaagtaaaatctagcatggcaacttcaaataacaaacataggtaatgctggagagggtgcgccaagctggccagcattcttacgaagtttggctggcacagagcacacaagagaagtcatattattgccaaaaagttcttgcagtgggtggaacctggacaaagggagctgttctctcccctctaagtcttagatatagctgggaaaaacagacagagtcatgaccctgggttcctttgtttttggaagtcatgtggacattcttcttttttagcactgtttctttctaatgataaaggaaacagtatattgatgaactcctatttttcatttgtggtgctttctgaatgctttctttggaacccaaagtctcctcagccacacctttacaagttttatggttctgggtggaagcatgttttcagaaatctaagcctacgaggtattttttttttttttggcaggttttcactctcattgcccaggttggagtgcagtggtgctatctcagctcactgcaacctccgcctcccaggctcaagggattctcttgcctcagcctcctgaatagcagggattacaggtgcccaccactgcacctggctaatttttgtattttttatagaaatgggatttcaccatgttgcccaggctggtcttgaactcctgagctcaagtgaactgcccatctcggcctcccaaagtgctgggattataggcatgagccacagcacccagcctaagcctatgtatttttgttttgttttgttttgttttgtttttagcagccatggcatcatggttaaattcatgaggtacctttcaatggagatgatatttcaactttaattaaaaaccaaacaccttgctggcattgtccagcccaatgaactagactctgaaaatgattttgaacaataattcaagataaagagctccagccggttttctcccctttggaagccttcaaagtatatttttatagatatattaaagagattttgtccaaatggcacatacctaaacagtttaaaatgtttttatacccatgttcaaagaaaaagaatatcttgaaagaataaactttttatcttttataaataaggttaaaagcagtaattctcaaaatgtggtctctgaaccagcagcatcagcatcacctgaaacttattagaaatgcacattctggcagggtgcagtggctcacgcctgtaatcccagcactttgggagaccaaggcggttggatcatttgaggtcaggagtttgagaccagcttggccaacatggtgaaaccccgtctctacttaaaatacaaaacttagctgggcgtggtggtgcacacctgtaatcccaggtacttgggaggctgagacaggagaatcacttgaacctgggaggcagaagttgcagtgagatgagattgtgccactgcactctagcctgggcaatagagtgaaaccctgtctcaggaaaaaaaaaaaagagtcttttgatgctatgaacatcatctggcttctggcatcctgctttgcccgagaatgaaaattccagttccagttccagaaaaaaagggcattcttcagttttgtgtcccctgccaggtcaactctgaacctgtagtggatactcagcaactttgtgcactgaatgaatgaatgaatgacttgtaggctggtgtgggaggttaagagaaatttattctagcacataaagatcttctgatggagtggatgagggatggaaattggtgatcaggctggggctgtgctgaaatatgcaggcgggttatgacagcaagagaccgtaaaccctgaaaggatgaaggttctcctcacatataaatttgacacatggaaaaaccatgcagtaagcttaagggagcccacctcaattctgatttcttcctgataactatgtcaaagctcttaaaactgtgcaatgaaagatctccacgcattttctggcccttgtcttgccaattctttcactgtgtacctggtgtgcctggtctgctgaactatgaagcatactcgaacatcatacacatgatcttcctttttaaaaatgaccttgagaagataacaagtgacattctacagacagactccatttcttctcttttgtttgcaaaagtgtgaggctgaaggaggaaggaaagcttgggttacctgaccacattctcatccacccaccctcaaacaaatgccccacacatgtagaggatgtggttttctgactgtttatctccagtgagccagagctctaggtcccctgtgctagagggggcacagaggcattattatcacccagtcctcactgggtgagagggagaatggtgagaccattgtaggaagcaaggtggaatcaggggctgtgggccaggctttcgaaacttgcgcgaatacacatgcagaggtttatgctgctgactctgccttccaactttccaggctgtaggagtgggaatttattgagcatgagggatgctatcttgtgaaactttctacttcattcgggaagggtagtttgtctgtaagaattcaattgtaaatacaaaaataccatttatttctgaggtgagggcaggaaggagagatgtcagaagtagacaggttagggctttctctttggagacctggatttcaacccactgaaagtcttaacaaagaggcatgctagtatcattcttagcaagcccagtccattgttatggtcagattcgattctgcagaggagaaaatggagtgtgacatgtttggtgccaggaatgtgagcatgcacctgcacagccgatgttggtgtcatatcgtcagctgaatggtcatttagcaattttggccaactcccttgacactatagggcttagatggcattgctttctgggatgcactgataagccttttacataagccttttacaaagtaagaccttggtgccaaaatccttgctgtagaagatgaaaattttatgttatttctaggggtgctttcaatgttccattaagccactgaggagctacaaccaagcttgaccttgaggtttagtcttagggaccagatgccctctgtgtgtttcattatcttccagaggaaattgttgagtgtttgtaaagtggttataggatgaagggaacactcttttaaagttcctaattatatcttggactttagctacagttaccgaaagacaaaataaggtctctaaaaaaatcatagccaactttgggcattggttgtagactagagtgcagtgcaagggaaaggcgggacacacataacatctctgtggctacatggggatagattctggaaatgaaaggagaaattccagcatcctagggggtaagatcaatgctctagagagggaagagtcacttgcatgtaatacaagtttcttggagatacccactgccattgaattgagagatgtcagtattcctgtgggagggttatgatgtttgagtttttaaatatacatatgcttctgaattctacttgtgggttctcagaattttccttccattttgtaaattgcagtaaaatatgcataagatttaccatttcagccatttgtaagggtacaattcagtggcttttagtacattcacattgtgcaatcatcatcactatctgtactagttatttgcattgccataaaggaatacctgaagatgggtaatttataaagaaaagagatttatcttggttcatggttctgcaggctgtacaagcatggcacccacttctgcttggcttctggtaaggacttcaggaagcttacaatcatggcggaaggcaaagggagagctggtgtatcacatggcaagagagggagcaggagcaaggggacaagaaagaagtgcagaggtcccagactcttttaaacaatcatatctctcactaactcattaccactggaaggacaccaagccattcatgagggatccacccccatgaccaaaacgcctcccatcaggcctcacctccaacactgggggtcatgtttcaacaggatatttggaggagggaagacatccaaaccatatcaccatccatatccagaactgttttcatcttacaaaacagaaactctgtacccattaaacaataattccccacttctccctctctcccacttccaaggaaccatcattctacttcctgtctcaatgaatgtgactactctagttacctcctttaggtagattcacacaatatttgtccttttatgtatagcttatttcacttagcataatgtcttcaagggtcattcacgtcgtagtatggaccagaatttccttctttattaacactgaatagtattccattgtatggagagatctcatcttgtttatccattcatctgtccatggacactttgggttgcttctaccttttggctgcaacaaacatgggcatataagtatttgtttgagtcccagctttaaattccagttttgcctttaatgtaatttaacaactggcagggtttgagaagtagggcaaagatagccacaaatttagtccttggtgacagtgagtggcaacttctgacctgactacgctacagaagatttctcatctcataaacctaattaaattaaaaatccagttggccaaacccacatgcacttaagtcagacaatttcttaaaaagctcattagctgcaaacttgagcgctccaccagcagatggaactttttcccctaggtttttcaatacttggacaggaaaggtcttccaactttagacctcaaatggaagattttatcatgcttgccagtgcatcggttttaatgtcattggtaaaattatgcaaaaagcaaccttttaagttttatgatgcaatgatgtaagatttcagtgtcattaaacctcggcttgcaggaaggacacaggttttagggaaagttttctgacttcctgttacaactgctttccctcatttcagttataataaattaagccctaggaggaatatattgaacttttctgtatttttaatttgggcaaaatgagatgaacatcatcaacaaaatccaggatgtaggacaacactcctgcgatgtttggggaacacgaacctgcagaagttcacataactctggccctatagttatgtcacaggcctcagaagggaagagattgggcaattggcttgtagtaatcatgtcccagattcttctttggggagcattaaaaaatgagaattcagacactgtgtctatctgcatgagtcaagttttcttctgccctctcaaaaaaaagtccatgattgcagttaactttgtctatatactgatggatgcatgatttatagtaaacttatagtaagagggaaccctgttgtttcccagggtttcgtatgtatttatagtcactttgaagtgacctgatttgaaaatggacagagacaaactgctggggggcatgcaggtggttaataaatactgatagagacccccaggtggttaataaatactgacagagacccggtctttctgattagaggaatcacagtttgtctctgtgccccttgcagcgtgtttgtgtgcatacaaatacacacaaatatattcacttattattggaacgttggcatttccattattttatgcctctccatctcactttcttatgacatctgttttcacagattcctagtcctgattcaaatctgaattctctgcttcttcacgtaatgctccctatatctgccacctcagttgaatctgtttttcctagagacatagttgtttccctcactcctctctctggaggttgctgtttctgtttttgtttgttttttgtttgtttgtttgttttttgagatggagtctcgctctgttgcccaggctggagtacagtggtatgatctcagctcactgcaacctccaccactggggttcaagcaattttcatgcctcagcctccccagtagctgggaatagaggtgcacagcaccacgcccaactaatttttgtacttttagtagagatgggttttcaccatgttgcccaggctggtcttgaactcctgacctcaggtgacccacctgcctccacctcccaaagtactgggattacagacatgagccaccatgccgggccatctttgtaacccaggagtgctggacactctggcccttcattgcccttctgttcttgtagaaacctgttttctccaggctcctgccatccgaccaaatccttcctctctctgtccttcctgatgctgtcacccatctaagtccaggcccctccccctattcagggatggccctgtcctcttctattctcaacctcagctccccccatcccctttgagtctgtgtgcaggactgtccttgctatccctgtgtgtgtctcagaccctcgacctctaccaccgcggtgctcttcttcctgctccactttcaccagggatcccctggatgctgccattacctggaactgcatctcacctttattccgggttataaacttcagggtctcactcagtgagggtaatccatgtttctcccacctctcttttgcttccactacactcagtcttcaaactaattctccagccttttctccacatatttatttatttaacaaatactgattgagacactttgctactttcttggaatttcgtgataactaaaaatggacacacacccggccttcatagaacttgccatccagcaaaggaaagaggagagcaattgatcaaaatgattgcacaaagacatgtaaaattgctgctttgctaactgctacacaaaacagaatacctgtgggcagggaagtgacagcagagctgatttctgaaggatgggcatcccatgtgagcaggtgaggcttctgggaggaggaaagtgcttgtgcgaaggctctgtggtggttggggtgggaggaggcaaatggagaatgagaataactgcaagttagattcctggagtctagatgtggaagcatgtgaaataaagccagagaggaggaaaagaccagagctttcagggccttgtggactctgtcaaggattttttttttcttcataccaaaagttatggaggacatttgaggtgatttaaggagggattctctccgatttacatgtgtgtcctaagaattcagtccattgcacacagagtatggcttcatagtattgcacttttggaagcaccagatcctaatgcctgtaaaatcatagagatttttactaggtttccttacatgtgaacaaatcagttttactcttatctggcaatcccatgcattttattttaatgctataatcccaaataccaactacaaagcccctctttcttcttcctttctttcatcttgaatacatctctacttaatccgttgtttggagtcttggtttccagtgaatcaatttacagcatttttgtgcatgtgcttccataagtcaaatgtgatgtttcatagtgctagcttggtaatttaggggacctatggatgattaaatggctctgcagaaatattacagatatttttaaatgtatgataacaaaaatccttttttggtggcaagattatatattatatatatatttttttgagacagagtctcgctctgttgcccaggctgcagtgcagtggcgttatctcggcttgctgaaacctccgtttcctgggttcaagcaattctcctgcctcagcctcctgagtagctgggattacaggtgtgtgccaccacacccagctaatttctgtatttttagtagagatggggtttcaccgtattggccaggctggtcttgagctcctgatctcaagtaatccacccgcctcagcctcccaaagtgttgggattataggcatgagccaccgcacctggcctatatcttcttctattgagaaccattcatgacttaggaatgacaagaacatatcaactatacttgctaaacagtaaagagaaaaaaatcattttctttttcccttaggaaaacactgagactcagtctgagcttctggaaggctaaagcctgcaaaaacatgggcttttcaaagctcacagaggcaaggagagggaggcgatgggtcagaccaccactcaattttctgtagtgatggcagagctgagacccagactcaggagaaagctgatccatggcccttctatgtcttgtgttagttttgtgggatgacattctgcatgagcaattgattgtgctgctggaaacacaaactatgaatctgagtgtctatggagtttattcttgtgatcttatgaaacaagtctcctgcatacagatttagggacaggcatattgtcagcatgttgaatcagacttatgtatacatggtttacagttagcataagtgagggctaccttttcaagccaaaagtttttagttcctaccaaggtcccatctcataatcatctgtttcaatctcattatttcacagattgggaaacttagacccagagagattaggtgacgtgcttaagagcatgttgcttataggggcagagtggagattcacacccaggtcttctgtgtcctgtgctcttccttctccacatcactcatcctgtgtgcctggttatattagtccgttttcacactgctgataaagacatacccaatactgtgtaatttataaagaaaaagaggtttaatggactcacagttccacgtggctggggaggcctaacaatcatggcggaaggcaaggaggagcaagtcacatcttacatgttggcagggaagagagagagcttgtgcagggaaactcccctttataaaaccatctgatcttgtgagacttattcactatcacaggaacagcatgggaaagacccgcccccatgattcaattacctcccaccaggtccctcccacaacacgtgggaattgtgagagcgacagttcaagataagatttgggtggggacacagccaaaccatatcactggtgtctgtcctttcctagaacagccaggtggacttggaatgtcaaaaattcttcttcctttttccttggttttccatttctcactttctctccccgttccactttgggagtctgaaatgagggtggtgttgcttctctgcctgatctgatccttcctttatatcctggagatgactgttgatatgtgtagcgcttcttacattcagaagggactcttgagtaatttaaacttctagatcccatgctccctgagggcaaaggccaggccagacttaactgtttcagttttgcatttctctgtctctcactctggcccttgtgcataggtgttcaataaatgtttgttggcattgttattaataaattcaccaggacaaaaacattataatttagatgttggaatgatattatctctcaaaaaacaaaatgtcaccagattgttttgccttgggagttctcacatctatttttttcttttttgtgtgtgtgagacagggtcttgccttgtcacccacgttggagtgtagtggtttgatcacagctcaactgcagcttccacctcccaggctcaagcgatcctcctgactcaccctctggagtagctgggattataggcacatgctatcatgcctggataatttttttaaagttttttttgtagagatatggtctctctatgttgcccaggctggtctcgaactcctgagctcaagcaatcttcctgccttggcctcccaaagtgtattttttaatatagtggattttattatatgtaaattatatacttcaatttaaaaagtcctatgcctttgggatcatatatagaaaattgtccattttctgagaagggtctctgccttcagtaggcagataaaccctgatcaaacatgcagaatcattaattagggtcatttgttctgctgtgagctgagaagaatgtgtaaaacctgctcaggagagaattaattcatcctcctctctgtactttttctagtactcctagcacgattctctaagcctgcaggcctcatacatatgttctaatgggctaattgttaaggcgacatttgtagattaatctctgacttgagctaagtggtttctcctaatggctttaattcagtgactcccattgtcagattcactggaggagcttgttaaaaagaggtgcccagacttcccctcccccagctcatgatttgctggccctagggtgggatgagggcatctctgctttggaaggaaagctcctcaggtgactggattctggtggtagccacctttgtgagccttggctctgaatctgcctcccaaggccgtgaagcctcacacacccgctgaaagcatatgggcctaattgcagcaactccagtccaggttctagaacaggaaatatttctaagagccagctttcccaactcaatcacctctatactcacatcactgaatctgcctttttcctgaagtgctccatcacctgagggggaatagtctatgcttggctgtgctattgtccattttcatgaactttcatgaaccttgtcagacatttgaaagatcttcatggtccaccgggattttcatctagcgagatggctatggacttcccctctctcctccccattttgcaccaggctccttctttgcatcaggtgttagggacagatttttttttttttttttttgagatggagtctcactctgttgcccaggctggagtgcaatggcaccatctcggctaactgcaacctctgcctcccaagttcaagagattcttctgcctcatcctcctgagtagctgggaatacaggtgagcgccaccatgcctggctaactttttatatttttagtagagacagggtttcaccatattggccaggctggtctcgaactcctgacctcgtgatccccccacctcggcctcccaaagtgctgggattacaggtgtgagccaccatgcccagcccacttttatatttttttattttgctttttttggagacagagtctcacttcgttgtccaggctggagtgtagtggcatactcttggctcactgcaacctctgcctccagggttcaagtgattctcctgtttcaacttcccaagtagctgggactacaggtgtgcaccaccacaactgctaatttttgcattttttggtagagccagggtttcactgtgttggacaggctggtctagaactcctggcctcaagtgatccacctgtcatggcctcccaaagtgctgggattacaggcatgagccactgcaccctgcccttaaaaaaaaatacaccgtgtatgtgtgttcctggcattcttttgtgcaaacacatgtcttgtttgatcttggagttttgaaaatagatgactcaaacaccattgttccaatgacatttatcaaattgcttttgtttttaggaatctggcacaccgagtactcaatatctccacacagtatatgggtgttttcagtaaatctgagaaggtgacaattcatactgtccaagatggctgaggtaatttgttgagctcagactatggcaagtttagcaaccaggacaggctctcaagcaagctagcagaagtgccctaagaggcaatgctcaaattatctgtgtatcacactgctgcccccaagcccttgtgtgggacaatgctttgttacatgcttggttattgtcttattctatgactcagctgctgtagggcagggatgctttgctttctggggtactgtgctttccttggcctcattttaccatgtcccttgggcttctgtcctccttgtccctgaaactatagaagcttgcaaaaggattcccaatggcctcagcccttcgtgaagagatattagagtagtggtactatgtagaaaggaaggacattttgggaaaggagaggatattgagataagggccctactttttctatctttacccagttactaatgatccatctaggcaatagttcattttatattggctaaacctgtactatatgatttatcactaattgcataatagcatgggattaatctacagaagaatgactctataaaaaagagtatattttgccaggtgcagtggctcatgcctgtaatcccaacacttggggaggctgagccaggtggttcacttgaggtcaggagtttgagaccagcctggccaacatggtgaaaccccctctctactaaaaatacaaaaaattagccgggtatggtggcaggcacctgtagtcccagctacttgggaggctgaggcaagataattgcttgaacctgggaggcagaggttgcagtgaactgagatcgcgccactgcactccagcctgggcgacagaacgaggatctgtctaaaaaaaaaaaaaaaagagtatatttcatgactccaagtggcctcccatcttctgtttttcttgggccttatgtataggatatgttaaatacttaggtgactatttggggtgctctataataataccattaccatgcagactaaaatgtaatcattttgtgttttcaaacttagagttctcagacaatggggatttgttagagagatagagaaagagagagactaaactgacacttctaaggtggctttgctaggggcctagagaagacaagtctctgatggggattctattttcatggccacatccaaagtattgatgtgttttctgcagcacctggatctgggctgacaatgtgatcaagcctgacacgataaagaggcatttagcaagtttcaagactacgtgcacagttaccttaatactgagaggcagatcatctccccagggagcatttcatcgtacatcatggggcagtttgcctatcctgtatctcattgagaggaggccttccagctgaatacgtggacccaaatgcatgtccattcaacagagtcttcagggccagggagctgtggaggttatttccctcctggatttcttccctctcttaccctatcagagagatgctgatatttgagttttcatcttcagagggtagcaggattcctggcctcctcctgtcactggctgatttgcttaaataaggaatgcattagtccccatcactgactccaagtggaggcagctggagcaaattaggatcagctacattggccatctggatgctgcgaaatcattgccattgcaggggtcttagattttgagttccttacagaatgatgtagatgccatttgcaagggcttctttccagtccttttctgcaacagtggctttgggtggcataggcctatatagccagctctgacagatgctcagcattcacagatacacacacagggagccaaatggacagggattagtcttaaatcagctgtttatgaatggagaagaggcccttctcctgggttctggccacaccccttctctttgcagctttttgagaatgaggtcagggccaggatctaactgcttatgcctcagaaatagcagcacagatcaaaattaatcttaagctttttgttttgctgcctcctttagataatagaggaaaaagcgaaggcctgctcatgtttttgtttgcttgtttttgtgtgtacctttgaaaggaacatatgaatgaatatgtgtgatgggaggggttgaggtgaggcagctaagagggattagtgctgggcgggtgataattactgatagactgcagcattcaattggagcatgttttagttgtttttttttttaaatggcagaatgaaataaacctcagtggtgtattgttttagcacctccctttatatggagattttatcagttgctatgaaactgcatattccttttacagtgtccaattgtttttaatggtcattttctgggctgtgcaagccaccattctgccccaggagctccatgcagttttgcaatgctttaaatgagtatctcatgcagatttcattttctgtcagccactttggcacacataaaaaatacaggagtgtgtgtgtgtgtgggtgggtgtaaaagagagagattctgtctctcatacatacacaggcacacgtgcccgcacacacacacacacacacacacacacacacaaagcttgatcatgcttagtctttacataaattgggattcctctctacccaccagccaaggcctgagagatgtcaatagatggacactgaggagactgacttccaatgcccttcagcctgcagtctcttcagggtattagcatacctggaaaggttgacctagcagccaggcattgtgtgtaatggtggtgcttactttttattctcaggcttaattgttggctgaaagcatcttctttatttctgactatcctttatttgcattaatagtctcctctgtgaaagattaaagaaagtagaatgtgtactgaggacagaagtgtcagtgtcagcctaatctgctacatattcattctatggaccttagcatgacaggtatccactgaaggagatgccaaaactgtcttccatccatggagattaattttgagtgaagagtgtaaagtaggacaaggattgtcacataactggcctaatggattgcctaattgacttcctgaactggaactactttcctaaatatttcagaagtgttctaatcatatagatcatacatgcagtgaatatatctttatgtatgtccacacatacacacacggacatttgtacgagcaaatttgtgatcttcaaattggtatctcttatgtagtgacagaaagtagattagtgtggtctggggcttggaaatgggaaaggggattgatttaacaggcatgagggatcttactgggatgatgaaaatgttctgaaactggattacagtgatgattgcataacttagtagatttactaaagtcattgatgaattgtactttttaaatgggtgaatattgtggtatgtaaattatgcctcaatgaagctgttaaagttgatattcctctattggagttcctgcagatcctagactacatataatattaaaaattgtatcaccctaaattttcacctgcttttttcccactgaagtttatcaactacaattgcagagaagctggacttcgagataacagggtcagataaaaacccagtgccctgagacataaaaggctaccctgacccctattggcaaggagcgaggttgctgcccattgctgtatgaagagccaaacctgaagcagtaatggggggctggggatgagggtgagatttccaagcaggtccccaagggcaatgggcaccgtatttcaaagctgcttcggtatgtgtcaaaaaacccaaacatcctgaggtccaactcttaagtgatggcattctcctcttcttttacaggttgtcttagtctttgctctcagcatcggtgcacttgtaatatacttcatagattcatcaaagtgagtattcaaatatactttcttgccctcgtttcataaacaatcatgagcctttacattgatccatttatttaccttgacaccaacctttgcaagaccttctgagtgcagaagattttggaggaagctagtgctgtactgtactgattttctaaatgggaaagaaagttctcagaaggaaggctattttgagtctgctggcataggagggtgaggtatatgaggtcaagtcttcttgctgggtattacttatttttaaagagctgtttcctaatgatgtatttgcactgaagatgtcaagtagttaagatgacttgatgggaatttgcaacttctgggagggtgacagtttcccacagatgagggtctgagccattcttgctatggttgtaggatccttttctcaattgggtttccaatgctttgatcttactggaggtcagattagaaagcatgatgctatcctttcacctgccaatcgggtattcagctgaagcattgcacgctggtgcttcttgacttgtgaaggtaaggagatggatggaggagttcatcatgacccccagaggtggaggccctggccatttgaggacttctagagtggacactcatgcagactccttgggtgccagccgaatggactggtgctccagagtgagcctgggtgacagatgataaagaccttgcagaaggatgaagagggcacagactagaactgcaatgttgcagccagttctgccctgattcctgcaggtgccaaccctgaggaaataatttgttccaactatactattgcaaatcatgaagttgatggcatctgggaaacaagctggagtctaactcattttctgttgtggcgtgaacttggcaactctggtgacaatggccttgagcttgttgcctttattgtccactgtgtgagtgttttgaactttaaactctatccctggcatggttggctactagactttgatactaggaaacctgcttggtgtgcctgttggctcagactctggtgtgcctgaattctgagcttagtgctcctttcctgtggcttgggatggtggtaatttcatgcacagctaaactcagaatttctcagagccatctggtcaccggccaaggattttgtgcatttgggtggagaggccaaaatgtcagtcagggaaaacaaagcaaatatctcctttaataacctgtctctgggaatcagccaagtttaagcctatcagaggtccttcagcccaccccacatgcgaggctgggctgccctcacccatctcagatggagagtcctttaaacgctgtcaggagacaagattccacatgctccctccatcagctctcccgagccaagaaagagaagagcttgtttaagtttggaagactcccattggcatgtcattgaaggtaagcccccttttaaatatttactgttaatgattctggatcctatttgtattgaactgaagatcctctaaagcccctggtcttatttctccaatctctctccaggggtgttcttacatgtcgtggggtgcagaccctgccaacttccatgctgagactcaggaaagaggtttgggcttgaagcttgtatgtcccagagaaagaaaaccctaatgtggaggtgagtgtgttgatgggttagaagtccagatgcctcagccagcaccttccttcccttttcgtttttttattttttttatttttttaaccttttgtccctctgtatttctcagaaataaaatgctctttagatggatttggattgtgtctttttttacagtctactatgaggcagtcttttgttctgtagatcctggtgttctctgtttccgtgtgagaagatgaaaaggaatgaaattccccaatgcaccctcttcccctaatgtcctacaccatctcaatgtcctttggctttaattgtgatccttctaggccttggcgaagatggcactgggagtcctctctgattctggtttcttttatgaacttgcaaatagtctatcccaaggatggaacttcagtcctgtcctcaccttttcctggcaaaaatgcccataaggttagaaacaaggctattcccattctgcctgaggactgtcgtagcctcatcccagctttagcctttcttctctgttgctaaactgtgtgatttggcatagcaaggctttgtttataagaagaccttctggttatttatatagaaacttttcattttcatgacttcattttgttctgagagcatatccgaagattctgtccggtggcaggcccaatcagtggattcagcacaagggagttttccatcttccttgggaaagacggcaagcaagctcagttttagtttgggagagaattagtgtagaatctctaaagccatctctatggtaagtccatagatttccaggaataaaacacagtgaaacctattaaaaaattataatcgagcttagtgaatgagaaaaaaaaatgaagttctatccacatataagatgcaaatggaaagaaagtgagaaagtagaatgtacattcttaaaatccatgtctttcattcaaaactgttaccagttttacacattcatggtttggctggccatctgggtattttggaaagacagctttaaacttctcgtggaagttatactaaatcatcaccctggaaaaaaagcacccagaattctccagatgaattgtagctagtatttacacccttcaaataaatgaatcaggggacagtctataggctttcccacaagtgaatctaaaccaacagacatgcgtgaaatggcttgtctcagtgaattttagccagagctgcccctcccctccagaatgctgaggactatcctgtagcacaagtttgagattccaggctctctgcacccagccctttgaaaagtgcaaggaatgccgattaatgtataaaacaggctccctaggtctgctggaccagctatgtctcgaggcaggccagctccagttgtgcaagtggacaagcaggctaggtagttattttacttctgtccattagcaatacagctcagagaaaggtcatcattggtggtttatgatctttttaaccttttaaagctctttttactatccagaggtgatggataagtcacttccaaagacagctgcacacctttcatttttggccattaggcaaagacagatcccagcatagggcgttttctttgggtctgatcttaatgaacctagggtggttgtgagggaagactcatttgtgtagctgcaagtgattactatctggctaagacagattgtcctcagagctcctggaattgaaaaccaaagataattacgttaaaccttactaaaattatgctttatcatcccagcagtagactctctagaaacacccaagcagaggaagatgcctctggactgagtctttggtcagacatcatgttagtgccttaacaagcacagacaagcattgagccctccacacaccatctccccaaagatctccaattagccacacgaggtggattgtgtacaaaaagctccctttcttttgcattctttttaaaaggactcctgcccaatttatgtcacacgtcactttagttcctaattctgatgtctcccgacaccaacgccaaccctgtcctcccacatattctgatccttgtgaagcaaagattttttagaaattgtacaaccaagtcaagagtgcctgcagacgccctgtgggtgctaatgtcaccattgctgcttccatccttgtctatttcctccctttgacacaagaacagcaattcttatctaacagataaggaaaaaaaacaaagacccaccagtgtcagcatgagagcgagattcatggattgcataatgcagcagtccctgtagctttcagaatttcaagagaaagttggaagagacagaggcccagagctctgggtatttgcattttcaccaggggcattctgggaaaggatgactcacatgtgtgaagatatttattcctttgattcatgtttaaacgctgctacttcttatgctacggttacgcggattatgaatatttaatgtggcgtatactgaaaatgaaggtcaagtcctgctcactggtgacttcaatgcaggctcttgtctctgaaagggaagctacctgctgtttgcagagtaaagctgaaaggttatacgttgttaaatgtttccttaatgactttatctgctccaaaatggctggcacacaatgggggcacttgctgattttgccagtctttgctcttggcttctggtatcagcactgctgttttggggatatggacgttaggaaggagcaggaaatggcagcacaaattttgtagagcatctcatccaagggcacaattgccaaggcaacagtggggttacgattggaaaatggcctctccccagtcttttaaaatgttacttttgcatccactcacccatttattcattttgtattcatttattagtttgtaacatcttcaaatgtgataatgctgaatattttccaggcagtaaaattgcttatggttaaggaaaactatctttaagattgcgatagaaattgaccagattgttttcatagtctctgaaaataaaactggcaccattgatgtattggggatgtccagagctttagcagaactggtttagttgcccagtagtttctccctcccctgtcttcacatagcctggtctctcatcccttggcctagaaattctgtttcaaaagggaagagagggcaagtcgttggagggaactaacattcactgattatgtactgtctgtgagctacagagctaggcactttaccaaaaatagcacatgcaacctcattgaattcccctaacaacttcttaggataggtattactattcccacttacagatgaggaggctgaagctgcaggcatagcccaagctatgtagctagtaagcagtagagccaggattagattccagcatggctcattctaaagccatctctcttctaagtgtcaagaagtaaatttccagattgtgtaagtaactgatggggtttaatgagatgttgcaagaatgggaagttgcatcacctcatcctgccaatgcactggtcttgttttctcttttgttctccctttctccatttctcaccctgagaaccaagtgtgcagttgtgggtacgtaggaggctcctatcacaggccttccatgtaagacactgccctgggtcaggtgctgtctgatgtctgtttgggccttgattcagttcttcctaataatggcttgatgagaccagcttctctgttatctcagtggagtggcagcattttgcaatgagataggatcaaatgaacaaaaaacaaggagagctgattgttcctcattagcttccaccacctaggggtgtctttccaagtagaaagactctttggccttcctatccttacctaatctgtccttgtgatttggcatactgaaatagatatgagaaatgctgtttccccatgagatacattcttttatctcttttagagagttacagaattagttgatttgttatagttttgcattatgttatgcaatgtttatatgcccagagagttggtattatcaaactaatggacttcaggaaaatttggccccaaagaatggagccacataggatggaggtctttgaaatgtcataaagtatctggcttccttctccagccttgttcaaactgactaggcacaggtgtagacccactgcctctcctgtgctcagccccaagacaggcacctgggagagctgtgaggacagcacagatcccatcccattcatgacagcgcattttaaactgtaaaggactgtgtataccagctttcactatcccctttagtgtaccccatcctgcagcatgatgagatgggcagcctgtgacatggaaaaggaagctcaccagcctactctgtaaccagttcctttatgaaatacagcctttctaggtagtgttctggaaaattagctccagctgtctgccttcatgcccttttttgagaagtcacggcatgcatttaacctttgttgaagaagtcaacacaaatcactgtgtgcaaagcacctccctgtttttttttttccttttaaaatactccccccagttttctccatccctcactgacatttttattgccaggctttggtttggaaaattatgggtagggaaagttcaagggcaggatgttcagaacggcactgcacatctgtgaagggaacacaacaggagagccagcagctgttgaaagaatggaatgtcagatggtagaggagccgagcccactcagggatggtggaagagaagatgccttcagggcaaagaggctgtaaataactccaatgggaagtcttgtctcccttcagaatgtaccctttaatagcaacacttggtgctctgatatgagagtaactctaactcagccttcctagctcatctgaccttccatattgccatttgttcaggaatcgagtgaaagcctggtagagaagacaggtggagagtatgccaaggaacagagtcaacttctttatatgtccttgtctccatataggtagattttggggacaggatctgttctttggttgtcaaacagattggtttcatttacgtcaaagttcagagcattagcacccttcctccttctcccttccacattggtgaggaaatcttgtcttccttgcttatttgtcattgcacaagtggtacctaggcatcgtaggcaatggcatctagaagcattaagggaactgcttatctttggctttcattggggaaatcagggactatgctaggaaaggacaggaggactgagctgaacctttcaggtctgccacaaaagacaactgtagaatatagtattagagtcaaagaggcattggatcccaactggtgccactgttctctgagcctcagcatcctttcctgaggaatgaggatgagggacctcctcaaggtcatccgaccagccaggggcagagctggagctggaagatagaacttttctctcccagtccttttctacttgatctcctgggttctttctactaaatacagaaatgaacaaagacatgataacctactcattgaatagcaaagtatatattgtctttttatgccaattctggacttctaggcccttatcatgggggaaactttagggccatgggaaagaacaaagataatcccaggtggaaaagatcaaatccagccaggtggctgcgtgggattagtttatttcatcctcactggtgagaggccttgaattccttgattttatgaccctcctactaatctctctctctccctccccactgtctccctctcttttttgtactgtttcagcatggagttggggatgggtaagagttaagagttcagctccactgtggaagggtaacacagggctgaacgcattgaagagctgaacacattgttttggcctgtttggaatttgttatgcataacttttgaggacattttgcccaattgctcacttgtttcccctgtggaaacactatctgataactatgtctatacatccctatctactttgccttccaaaattaggatgaattatttcttcccttctcgccactctccaaaacttaaaaagaatgctttggacaacctggcactctctcagccctctcttattctttttaaaagaataattgtttcagggcaaatgaagaaatgcattccctttcagacccactagcccactagttacttctgtcctctacaacaagcctgagtttataccgcaagagggctgcatctcctccctgtcacatggcactgggcctttccctatagtcacaggctgacatgcattcagagactgctgagagatcaggataggagccagctggagcgaaatgttatagctcagaacagtttaatccaaacacaagggcagtgcttgtgcctaacacaactgtggtaggggtgtggtgtggtgtgtggagtggtggcagcttttacagctttatcatggggttcatgggctggaggagatgtgaactcttccttgtcttttaccccttgtcttttgacctgacagcctgacacatgtagctttggggagaccctggttggtgatgagtcatttgtggcttaaaaatagaactctcaaagcaacaatgcccttgggactttttgatgcatatgtctttgttcatagaatttgggagaaaagagagagagggagagaaagactctgtgtgtgtgtgtgtgtgtgtgtgtgtgtgtgtgtgtgtgtaggaaacaattatgtcctgcctaaaaattaagtggagaagaagagcatgggggaattggccaccaggctcatcacagtagcagagatgaggctgagagctgtctgtgtacctgtggccttaaaggtaccaatcagataatagctctccactgagtacaaactgtgtataaggcattttgctaggtactggggaattttgagtacttatgtataatgctagatcttttccattaagacatttaaattatacatatttttacaaggggcaggaagtccagccatatataaaggaaaaataagataacaaaacaagaacaagtaaggcatcgctaagcaatatatcaatgactaatatgagcattgcacacagtaagtgctgaaggttgaggagttgaaaagatagctggatgctataacatgttttggctgtaggggagattttgagttgaatagacagaaaactcagtctgccctcaactctaggagtccacaagagaagactctcattatggcctgtactcgggctttgtgattttcagtatacgctaaagtcaagcaaaaccttgccttgaaatcagctactgagattagggattgagaatgcttcagggacggcataaaataatcagagaagcggactctatccagtggcagtaatacctgttgtccaatgatagatgattaaaacttttggaaatttttatttggaaatttccagaagcatctgaatggcatccactccatctttttgaaactgaggtcagtgtgcgacgtgctttgcaggggtcttgttacgaacttgccacatacagagcatcacaggggcatgatggggaggagagtctgcagtaaaatgagcttgtgctgctcgcaaacaggccacagtgtgggcatggttgttggcctgaagaccagcatttgcctccagctccgtgctgtgatttccatggactctaggtacgttggctttgttgagccaattcttccataagaatattaaatattatattttgcggctgcattggtataagaatgaatataatccaggctggatttattattgttgttattattactattatttttagagacacggtctcactctgtcacccaggctgaagtgtactgacatgatcatagctcactgtaaccttgacctctttggctcaagtgatccttcagtctcagtctcctgagtagttgggattacaggaatgcaccaccatggctggcaaattttttttttttctttgagacagggtctcactctgtttcccagactggagtgcagtggtgcaatcatggctcacaacaacctctgcctccagggctcaagtaatcttcctgccttagctttccgagtagctgggactacagctgggcaccatcatgcccagctaattaaaaaaaattattgtagagatgggggggtctcactgtgttgcccagactggttttaagctcctgtgctctagcagtcctcccacctcagcttcccaaagtgttggcattgcaggcgtgagccactgtgcccagcctggattcgttgttattattcgtcatttattattatatttattttcttctgattttaaagaagttaaaatttagacttttttgtgtcccataagtacagtggcctcaggcactgtgcctgcactgcctgctggagaaattgactttatttctccctttccaacagccccatccttctggaaattttcacagataagaaaacatgctcagagacagatgccttatactaaaccccttcaatgtggtctaattgtttcaaatgagaaaattaaaataagcattttattttaagccctgtctgataacttggctttgggaaataggaacttcagcaacccagcattcaaaacaatggatacaacaaaaattttaagacaacttaatagtcttgcttttctcccgagttttggaaaaacatgtgccttttccattcttttatctgacaatgagtcttactggtttaagagatctgttcgctgagagtgcaacagtacaaaataacatttttttcatctgatgtttgcaaattcatctggacagggaagggcagacattggaaatgagtgaggcggatctggtgaggactgcaatgagagctgaagcctcacctgaagtggcttcccaggtccagctgattgttcctatgcagaaatgcaggctctagtggccagatcttcctgtgtttcaaagaggagacagaatactgcattttatgttgaatctccaattttaaaatattggcctcaaatccaaaactcttaaagtacttgcaggccaagcaaaacacctctgcaggccagatttgggcctcctgttttcagcctctattctaaactgtctctctttctggtcttgaattggctgtgctccctgagtgccaggaaacgttcttaacccttgctcctccatctgccaaaaaggaccccttctctctctaagatgggaagcctttggtctcagggtgccccgggtcgtttgccatctaacacattttcaaacactgcttaaatttccatttttctcgaggcaaatactgtatgccacaccaataaatcatctacagcttactgtaagccccagagctacatatcactaactctacatcatctctgaaaataacgttgttagaagctcataaacatacactctgtttgtttaagaactgcaagagcttttaaaacatggttgctaagtcacagggcatattttccaggacataaatggaagtgaacatatgccccttaaattgtcagattctttttttataagaagagaggcccaaatctgtctgttctgccaggatattaacttgaccaaagaagagttgattatactaagtgtgtaagtgttagtaattattggaaactatcctctgacttacttagctaaatgggcacattgtatgaaacttgatttagtttctagcatatgtaggtataaggtacaggttgacatggataaatcctggctttagttttcatgaaccctaaagttcacaatttgctgaactttgtatttaatatttactgatgaaattcttacggtgtcgtcccttccaaaacaaaatcggaggcatacttagacttttcccctgagacatggtcccaagtctaggctacaacttcatcactgaccctttttcatggaaatttggcagttagtgataggtagcgtctgagcttatagctcagatattttcaaagtaggaagtagatggccctattaatatcaactgccatttcagtagagctgcctcatcagtctcttttccccgtggaagacactcacaccaccttttacctatcaggacactctcaggaagaaatagtaggtagggctccaggacctctgatggtggaatctactagaatgcagttgtccttaacaaggatacctatctcatgttgctcatcacacccatgcagagacctgccaccttgtaatttgagagctggaatttccatacacccgctaccctcactccatgccagaaaatgcagaaaatgaacccatggcccagtttgagatacaattgatcttgaggccccagagagaactgcagggacagtgtgcagagaaggtgaaaataacgtggatgctattagatgactgtacctagcatgtgcttttcctctagcagtgggaggaagtggcacaggagtgcattaaggagtttgccctcttcataatagcatgagtagaaataataaggcaaggcctttaaagaacagcattaataattgaaaggtgctccaggcagccatgtggtcttccagtgcctttgagtacaatctgttatcaggtacgaggtgaggctgaggagtagacaaggagggtgcatttggcggctgtgtctgtgtgcatgcatgtgcttatgcttggaggaagtatgaataagatttggcagctacagcaagtaaaattatagaaggcaatgtatgtatattaccatgtagactggtggtggttcttttgtgggtcaaacacccatttgggaattggatgaaagctgcaaaaattttgcctgccaggtaccctatagttggtcaatgaaacccaaactaaggatttctattctcttaagatggattcatctgctcattcactcctgtttcttctgccatgaagatcaggtgactgccagagggccatcttcaaacccgaaggttaagcagaggttgactgggaacttttccctgcatgacatacaaaacatgtctaagtgaaagtctctgctgtgttttcccttcttgatcaagtgtcccttaacctgcaatgcattcaaaatctcaacaatgacaggtgatgctaaggaaactctgggagggaggccctgggcttcctacctcttcctccaataacagacaacactaaaaggggtaggtaagacaagatgcatctattaggccaagcctaagagctctttgatttgcttctcttgtgtattgtgggttagcacttgtttgtagaggacaaattcctctttaggcaatgattccaggatgcaaacaatctccagccaaaatcattccacccgagacccactgctgttgcaccaggaactagggaccactgggtacccaaacagatgcaaaagctgccacttctgtacaaggccgtatttctcaccctccattggagaggaagaggtgagtgtagagagtcgccagggatctctatgggctcatccaatcagtcttcagaccagtttgacagaaaacagaagaggagcttcagcacaaggaggcctcatctcatctgaattcccagcttccttcagatttcttcctgacctcacctgcctccaagccagccgactgtgacagtttaattggtgcagggaaggcgaggcagtggggaggcaggcaggggtgcctggcattctggaaggagactctcctgagatgagtgaggggaaccgcaacagacaggcctgagagcgctgccttcgggtagaaggtcacagagctttgcttgaaaagaatgctggctgaagaggaaacattgccaactccctcctctttgagcccactgggccagaattgtatattcatatttgtcatctgtgccctttccactctggggcaaaaaggtctgctgggcagctctggcggggaatgaaaatgggtgggaatgtagctgggcagggtggctcacatgaggtaagaggatcacttgagcccaggagttcaagaccagcctgggcaatgtagtgaggccctggaaaatgttttaaagattagctggtcatggtggtatgtgcctatagtctcagctactcaagagcctgaggtgggagcatggcttcagcacaggagtttgaggcagaagtgagccctggttgcaccactgtgttccagcctgagggacagagtgagaccctgtctttaaaaaaacaattttgcaaaaagaaagtggggaggaaggagcctagtggtgaacaccagggtttggaatcagaccagaccttcttggcttacttggctctactactttgtagctgtcctgggcaagccagttaacctttccaagctatgaagtctttcctttgtcacatggggtgaaagtggtgatgagagatgtcatagtggataatacctacctgatagtagtgtgtggaaacaattagacactgcatggaaaggctcttagtacagtgcccagcttgaacatgaccaaaaaaagtattagatattattggtattgttctttttgaggtctgttttgaaacttttaatcaggtcttgagagagatgagatataaacacagtgaagttaagaaacaaaataagatgtattgtaaggcagtaaagagatcggttatcagaataatggacgagacctgtgcttctgaaaactgcaatctcaactcattcatggtttgtgaaaggaaaaacaagcatttaaaaaagatgacacagctgggcatggtggcttttacctataatcccagctactcaggaggctgagtcaagagtatggcttgaggccaagagtttgagatcagcctgggaaacagagtgggaccttgtctctaaaagtacatacataaataaataaaacatgagattgatcagcccaagatggaaatatagctagagaagttcaatttgattttatgaaacttttgtttccattacatatatagatctatgtactgtataaatgtatatatactgtataaacgtatgtatactgtataaatgtactgatttgtgacgtaaactctgtttcttactgtggaatttgctaaaaagcgtttaagaaacactagcttttagtgtagaagccagcatacttgctggttgcagtaatccagggaactttaaggaaggatggcaggctagagttgggtcccaaggcatgggtagaatttggatgctgcagaagaggggcatggggtgagcagtccccaagaccatcctccctctgacatcaactgcaggtttggcacgttccccaagtcaccttcaggttcgataatgcataggactgcagagctcactgaaggctattatactcacggttacaatttattacagggaaaagatacagattaaaatcaaccaaaggacaaagtacataggccagagtctgggaaagatccaaatatggtgctttcattatctcctccatgtggagtcatggatcgtgttacctcccagcatcaatgtgtgactacacgcaaggagtactgtcaatcgagaaagttcgcccgggcctcggagttcaaagtttttactgggactggatcatgtaaacttgaatgactgccctcatggccagcctcagtcccctgctcccctggaggtggatggataccatgtaacccaaagcctccatcataaatgacattgttagactttctggcatggtcagcccctacccaaaataacactgttactatctggccagcccaagacccctggaaaagacacttttatcaggcatgacactccaagggcttagacattgcctcccagaagctcaggacaaggccaggcctctctttgggcaaagttaatgtctttacaaaaatagtcagtgaagggactttgttggctggaggagaggcctctcttgaggaaggctggaagtgggtcctttgatcacttgcatgaatagcagaggagaggaaaatgctactccatgaagtggatgcttccagattctactaatgtcaacaaaatccctgttgaaaacgaagcgatttattccttcccttggctcctctgcatacccgggctgaataacctgttagccagtaaggggaaaatgaggcacaggaaagaggaaaggggtcagcctggatgtatgcttgccatgtgggtgagtgaccttgggcataatggacctttggttagatctcatttgctgccacctccgggtgaccaggacttttcctgtgccttgtttctttgcagacctgatgaatggtcctctgtgtgcccgtgacaactttagtaaggagaatatctgtctccctgctccaatttaacttcctttctgtaaaacttgatgaggtcaaagccagaaagcactgaaacttcaagctggggatcaaaagcatgtcatccagccatgctgcccccttgcaacctggcaaatgagacaacctccagccagggacagtttataattgtgcaatcaaattaacttggatttcagcctaatgaagtccttaatgccctgaatgaggccaagccctaatatttagagaagcagactggaccccaggaaagaaaagaacaggcttcagttaatgcctgctagtattaattatgcttcttccaaaattcatcttctcgtaggaggcaacctgatagcacccagttctgctaaggggttttcctgctgtggctcataaggagaacagtggaaagaacattttattggaaatctctgctgaactctgcgttctgggccacatttcttaacttcacaggatcttagctttctcagttgaacaggaagaaaattcctcctctcttagaagtgttttattgtagttaaaaatcaatactctgaaggcaggtaggcttggttgcaaatcccaactctgtcatttgttagctatgtgaacttgagtgagaaattaacctctctgaggcttagttcccttaactgtaagtatggttaatgatattcttggttgttagtatggagaatagtgaatgagatactgtgcatcaagcacttaatacagcacataggacatgctggcatttattaaatctaatgatgatgatggcataaatgtaaaataattttcagtatggattacatgtcactaatttggtatcagtagtctttattttcattaagccaatgatttagctcttgtttagaaaattgctgctgattccgtaattaactcaataaatatttattgaatggctattatgtgcctgacactattttaagccctaagcacttacattccagtatcagaaagagacagaccgtaaacaagttgacaagtaaataagataaattcagttgatgccatgtgctgggaagaaaataaaactggtaatggaaaaagcagggtttcttaaatgttttgtgctgaggacttctttggcagtctggtgaagactatgacccctttctcagaaaaatattatttataaaggcataatataaaaacattggattataagaaaatagattatgttaaaatcagttatcagattataaaaaacaaattatgataaagtctgcttgcttcttgattagggcatttttatgaagatccagcaataattctaatataccaccatcattttaaagtaggattaatataagtaatactttgagatacctgtaacaattgtaatcttatatgtaaatatctgagatttctgttgctaaaaaaagttacaagtgtcattaatactgttctaatttattgtagaacacctgattctgtcactgttcggggtgccacttgtaacctgccatgatccctggtggactgaacaaagtggggctaactggggaataaaagtcaaagacaagagagtatatttggaagaaggggttgggggcacctcgcctctagtggacaagggccctgagctgtttcggtcctccgaatttattaggtaaaagagataacgagaaaggggcaggtggttgtcggccagcagtttgaatcacagcaggcttgcaagactgcattcttcaaacaataggcactagatttcccagtagataactttaaggagcccagcaaacctcctggcccttagcaaacctcctggaggcatgcgcagtcctgagtttgctcacattctgcattcacgataaacagtttgctgtttgatcatatagcctccagtggaatgctgagttggtcatgtcccatgggcctttggctccctacagtttattgctatattcataattaaaggaaatgccaaatttgaattagaggttaataaaaataaagatgtaatttttttggtccaaatcatggactccctgagtactgcacaaggacctcttggaagtatatggccccaagtgaagaatccttgggatagagaatgacttgtattgggcattaggctattactttagaaagagtaataatgcaatttccacttttaaacagtcattctggacatatagatcagtggaatagaattgagagtccagaaatacatccagtttttatagtcaactaatttttgagaataataccaagaccatttaatgaggaaagaatagtttttccaattaatgatgctgtccagtgtgggcaacatagtgagactctgtctctacaaatttcttttttaaacattagccaggtatggtggcacacgcttgtgaacccagctacttgagaggctgagatgagaggatcacttgagcctgagaggtggaggctgcagtgagttgtgattgtgccactgcactccagtctgggtgacagagtgagaccctgtctcaaaaaaaaaaaaaaaaaatggtgctgggataactagataggcacatgcaaaataataaaattggactcttcacatcaattaactcaaaatagatcaaagatctacatgtgagagcaaaaacatttaaacttttaggagagaagacggggtagacctttgtgacattggatttagccatgaattcttaaatatgataccaaacacaaaagcaacaaaagaaaaagtagataaattggacctcatcaaaattaaaaacatttgtgtttcaatggaaggacattacaaagaaagtgaaatgacagcccagtttaaaaatggtcagtttatgaatacatctctctctaaagaagatatacaaatagtcaagaagcacatgaaaagatgttcaacaccttagtcatcagagaaatgcaaatcaaaaccatggtgagataccactttacacccatttggatggctatacttgaaaagacagatcataacaagtgttgacaaggatatggataaattgcaacccttgtggctgctcgtggggatgatgtagaatggtgctgtagctttggaaaacagcctggcaattcctgaaaaactgaaagacagagctaccatgacatgtacattccactcctaggtatttacccaacagaaatgaaaatacatgtccacacaaaacttgcgcttgaacattcataacagcgaaacaatctaaatgcccatcaacagatgactggattaacaaaatgtgatgtgcttatgcagtggaataccatttggctataaaaaggaatggagaactgaaacatgccacaacatatgtgtaccttgaaagcattatgctaagtggaagaaactagtcacaaaagatcacacagtatatgacttcacttgtgtaaaatgtcaagaataggcaaatatatagagtcagagaatagattactgactccttgcttgtggggagattgggggttgatagctgaaggctacagggcttctttttgaggtgatgaaagtgttttaaaattgattgtcccattgaattttaaacctcaaatgggtgaattgtatggtgtagaaactagaactcaataaagccattagcaaataatgactgtgatgtggagaatagagttcagggaaagacaaaagcaaggaaaatatttgggaggcagttttcttaggtctcaactgagaggatgctgccttgggagaggtccgaggccattggggtgtgagcacatgctggaggcgtcacagacagagcagctgtttagttgaaaatggagaggaatcaagagtgactcttaggttgttgaccataacaggtattttcctcctagaaaagctgagcttcagttacaatctgcagaaatgctgggaggattagtggcaaacctaaaaaaaagaaaaacactagaagcttatcggagagttggtttgcaaagtttcactatcaatttcattgtaccttttagcagggaaaaatattcatcatacatgcacacaaatttacacacaacttcacatcttgaaaagcaacaatataaaactcacacgctttagaaagccaagccagggaagaaagaatgaaccccctgccttgtgacttctcatgctgatactcaatttgttcagtggaaacggatcagtgagtagagcaagtaggaaagaatctcttcaagaacttatgtatcttcgacatgtccatcacacataattttctcctagtcacatgtacaaatgataaaggagaggaaaatgtcatttcagggccttgagtatcacaggattttgataatgttagcaaaataatgggtaaaataactgatttctcaattaaagcccaagctaagtaacttgtcagcccaggtgtgttaaaatctgagttactctaggtccttctctagagacagtgtggcttcggtaatgagcaagctctggaaattaaagaagtaatcagatgttgattgaggttatctgcttcacttcaagcagaagcaaatcaagtggacttcccttgaagacagaaatttctctattgatagagctaagggtgtttcatgatgctgaattctttgtggctccttttcacataaaagtaggaagccattttccctggagtggaagggaggatgacttcccaggaatatgagctttgagccaaagaggcaggaactgggaggctctcagttacacttgagaaagaattatttctctcaatattgttcttcttttcctccagagccccagtgtgagcctgggtgcaagctctgataaattaattgacagagggttgacttctaaccccaacttcaccggcaaactttagctatgtaattccgcactggacagactgacagctcattttcctcatccacaaagaatgcagtgcaatagagaacttgtgaaatatcttctaactttaccactcttttgttttcttaatcctggcaaaattcacagagcataaaagtaactattagccattttaatgtgtacgatacagtggtgattcgtaccttcacaatgttatgcaaccatcacttctatttagtcaagacatttctgtaaacccaaaaggaaaccccatactcatcagagtcactccccattcctctgtcctcctaggccctgacaaccactgatctgctttctgtctctatggatttacctcttctagatgtttcatctaaatggaatcatatatttgcgacctttgtgtctggcttccttcattgacataatgctttcaaggttcatccacgttgtagcacgtatcagtacttaattccctttgatggctgaataatattccattttatgtctgccacacattttgtttatccattcatttgtcaatgaacatgtagattgtttctaccttttggctattgtgaataatgctccaataaacagttgtgcacaagtatctgtttgaattcctgttttcaattcttatatgcataggagtggaattgcagggtcatttaggaattcaatgtttagctttttgatgaatcactaaactattttccacaatggctgtaccattttacatttccaccaacaacatgcgggggttgcaatttgtccacatcctcgccaacttattttgtttttgtttgtttgctttgtgtgtgtgtacatatatatatatatatagccactactcccttggttcgtctcagggagtatgctccacctacagcggcagcttcagggatggccagcagcacaatgtgggaagagcacaggctttggactcagaccgaggtggggttcaaatccagatctccctcttcccaggaaggtagccttgggcaggtgataatctctgcaaatcttggtttctccatccatacaacagcaataatatactggggtgaagagatgagtgaagctcctggcacatgcctggcagacagtaggctgaacaaatgctcttcctcctcaattatggatagaaacagagaggaagagatggattttaaacaatctgcttttaaattattgttactactatttttggtattggacctcattatagaaagttttttttttttttttttttgccatgggcttctctgcaaaatcatgcctgattaaattaatacccaaattgcaatatgtttattctttagcccagtttatggggttaagggagatggatctgcatggtaaattgggaagatttactgagctaaccattgaactagagattcccaggtggatgacccacctttgcttttccatcgtgtccatatttcagggtggacttgaagtagtcattgttcctcaagttccttcaagaacatggacttcttattcatcctagaaaacaaaaacctcttggccacaaactgctttgttagttttgtatacactgtgttacttgtgatggaagcacacattccctatgtaaaacttcagccacatctttcaaataacactaacaagttccagtgatgtcgtattcatgctgaattattcttttcttggtcccaagcaaagtaggttttcacgtagtgagtgctgaggatacctccccttagggttggcgcccatggtagtgagggctttggaccaatgccacatgactacaggtggctcaagctggaatttctgttcactgaatgtggtgaataatgagggagggaaagagcaaagcagtagccgggagagtgtttacactcagtgccccagttagctcagagcatggtaggccaagaagacacttgggcaggctcataattttatgtgccttcaaattgatatttgttatgtaagtattcaatatttatttagcagagaaactaacctttgtgttggggaagcggaggaggaagaaaactgttgtagaggtggctcagggaccctggcaagcctctttagcagttcagagactctttgtttatctctgatcttgtccttatgggagctttacctcctcacacctggctttttatagtgctcttctcgatcatgtatagtgagtgctcaccctgaaaatctcatttttccatcttgttacttttccagtgatctcctggggactttatagattggctaccaggaaaccgagtggttggcttaccccctaattcatctctggctgagagttttctaaaagatattttaaattaggccgggtgtggtggctcacgcctgtaatcccagcactttgggaggccgaggcaagtggatcacctgaggtcaggagttcgaaaccagcctggccaacatggtgaaaccccgtctctacgaaaaatataaaaattagccaggcgtggtggcacgtgcctgtaatcccagctactcaggaggctgaagcaggagaatcacttgaaccctggaggtggaggttccagtgagccaagattgcgccactgcactccagtctgggcgacaagaacaaaactccgtctcaaaaaaaaaaaaaaaaattaaattaaatgcttgctttttggcaggcgctgtggcccttgtaagtatcacctcatttaatcctcataacatcttacagggtaggtagcagtattacccccttcttacagatgagaagaccaaggcacagagaggctaaagtatcttgcttaaagtgacagctgggaagtggcagaagtactcccaaatggctaatagaaattagccattttatgtgaacaattcagttcaaatggagcattttatcccagaactttaccgttaatgcctgcatttggcttgggcaaaatagcataacacttctttccaaaatagtcaggatttcagacccctgataatgacagagaaatgaaagcagtttgaggacagttttatcttaaagcatcatatgtgctaaacctggtgatttatttctgagttaagattggtataataatgaagtactaatgaagtactaatatccataatataaatatttctgggaactggtgggagctacccatctacaaaggtggttctgttttatttggttcccagggagtatagcattgatgtcataatttgcatctggcagtaccttctgagtcactggttaatgccaaaacatgagaatgatggagccctgaaattcattagcttcttctggggcttggtgaacctcaaaaccagaacctgggtttaatcagacattcagtaaggaaagtgatcaattgcttttcctatctgtaactaattgtatttttaaaaaagcagggaacttaatggggaaaaattttccctcttctgcttttctccatgagcctcaaattgctagatattctgtttccagggtgttgatgtcagtggaaatggcatgcacagaatcattatctactatgccacaagctccatgctatggtctggcaaagaaaagactgccccaggcaaaggggaagtcagcttatataaaaaagcaataagcttttccttaattgctccctaagaaggaggattctggcatttaagatgagctaaaagtacaaaaagaacatgttttgtaatgaaggaggcacacctccctcaaagacccctacaactactcttctggtttttggctattagtaaaatagagactgaacaatctcccattgtgcactcaggagtatgtggctgtcccggtagccccctcctcttttacctgaagcccctcagagcagttatgattgattccacttctcttctgaaagcatcaagtcctgggctgggcaaaggaaagatgaatgactcccatggctctgttgtagattacttagtgccagttgtcagttcttttctccctgggaagggtttgaaatgagattgttttcgacaggctatccatgataaatgattttccgagtaagaaattgctttcactgctgaacttcaccaaatcactctgacaaatgtttgtggctgcagggggccttctcgtggctgtctcatgcttgaggggtgggaggctgggatctcaaaccaggatggctcaaataggacgtctcccagtgaagacagaaagagacaggaatgtcgtctcgttaatgtgcatttggtcagctcctttcaactgctgctaaaaatcaacaagtgaggcccaaaatattccagatccaagaaaaataggtaggctaaagggatgtatacatctcttagttctgattattacattgttttcatgttggttataaatagaacagcaatatgtacctacagcaagggcaagaaccctcccagcaatgttgcaatgtttgcaacctgttattagtccatgacccttcctgaaaaatcataaaagcagcatgccctcttttaatattatttggcatttcaaaagagattaaataccatgtctaaaatcacaaaggactgttagaatttgccttttccagctgcataaagtcccccttcctcccctagattctgggagaatagggccttctgcaatcacagacacatgtcacttggcaacaggggcccccagggcattgacgggaagatgcctcctaagcttggatctgcggcctttgtgggtagcatcattggattgtttactcagag[450 bp omitted]ggggagtcccctggggcaggtggagaaagatgagtcatgtttcacctctccacctgttcttgctgaaatgataccccatctttctagtagttcctgcctttgtttagacacacagatggccagactgaagcccaagaggaaatggatgtgctcaagacaacccagttggtgagcttcaatgccagtcttttttgctgtaatgcccagtctcccctggccattctcacattgctcagtttctctctggccagtgtgcctgcccgttgacattctgccctctttcagaacattgcaggggaggagtctgtaaggtaaccatcaccaagtcaagctgtatatagtccagcattgccaactggattcgctttattcattcactcataaaacattttgagccttttctgcaccatgctctgtgctgggtgctgggaccatagaagtaaacagaaaaagtttcccaccttcaaggggctcctggtctcacatggtatctgacaagtgggagcagcggcgccaacaacagcatgggaagtatgttgagtgcttactattctagtccacgttctaagcattttctttatattagctcttctgagccttacccaagtctgtgagatgggtgctgtcatcatcgacatttgatggatgaggacattagggtgcagattaactaagtagctcccacagagtcacatagggaatgggtgacacctccaagatctgaatcccagaaactctggctttggggatagatgctctgagttggcactgcaatgggagtgagtcaagggcagggatggtcagcacttcagcagggtaaggaagagctgccggaaggagctggtgcctgagtggggtcctgagtgttcccaaggtgtcctggttttcagttttggtgagaagcagcctggctttcctgagctctgggctgggtctttgggagctgggattgtcctgcagcccctttcttgtagtgtaaagactgtcatagaaaaggcaagttcatcagggtcctgcctttgcatccagggggcttgagagctatactgaaaagaggagaagatgtgaaatccacgtgctcagctccatcctcaaaactccacttctaaagtcactcatttgggactgaaagttttttagaaactgttcagaaggaatgtggctcctctcccagtctggggctatgggccatgggcctaggtcacaccttgctgatcaggacagaaactggaataaatgactctctattttgggagcagacacatgtaaggctaattaggtctgctgaaccccaggtgtatcagggtctgtggaactgtaccatcccagatagggagcaaatatggcaaagtgagaaggcagaagcagcagttgagaatggctgactcatgggcagcacctcttccctggcctgacttcagcagggggcagatggcagaggcgtggcagagcaagcaatctgagccctcctgtagctgctgggtccatgctggaagaggctcctctgttctggaacttctctcgtggcagttggatattttaagtcatgaaggcttccatatacttagcagatctctgactcattgggctgtttgattccttgcgtgaaccagtaccaccaagacttcacttttgtcttcacttcgtccatgacctctaccagatccaagcacaccctccttgaaactgtgctatctgcaaccgtgcggtgtaaagaagtcatctgtggttagaggacagtgccccacaattgaggaaggaaaaaaggcatgccaatcagagagggcaaaacactcacatttgagaaaatgaacttgtgttctagtaagctccatcgctctgaccctcccggcttctgagttttctgtcaccatgtctgtctgtatgtccaatcaagactgtatcccatcttggatgtcatgggattctcattttttattcattctagatacactctgattattctgcactttcttttcaacttgtttgggggacaaacagcttttatagctggggagtgaggttgataataaagactttaaagacaaaaatacagatgtgcaggttaactgagcaggaccaagatgagcaggtggctgggttaatgtcatctgaaaagccaatacactgtgtgtcacaacatggtctgagcaaaaactacaaccactatgaatggcttccaaattaaaattctttttttttttttctgagatggaaacttgctctgtcacccagagctggagtgcaatggcatgatctcagcgcactgcaacccctgcctcccgggttcaagcaattctcctgcctcagcctcccgagtagctgggactacaggtgcctgccaccatgcccggttaagtttttgtatttttagtagagacggggtttcaccatgttggccaggctggtctcgaactcctgaccttgtgatctgcctgcctcagcctcccaaagtgctgagattacatgtgtgagctaccacgcccagccccaaattaaaattctttatagccaaagagaaatgatataatgatttcaatgcagttaaactctgcagtagcatgccccacaatacaatcataatataaaatcagatatgtagagaatggcaatcagcttcaatcctctgcctgtctcagataataaagctaaagttcttttttctgggagtgaggcaaccttgccatgagaaatagaaatgcaaaggtggggtcctcttggcctgcgttctgttggcctgttctctggaatcaggaatctagcccatacaacaggagcagattaatcgacttcaggatgtttttgaagtcattgatgctgttctggaagtcccaacagccaaaggatctagaagcctctaattgatatttaccccagagcagcgaactgacccaggtagaacctgaaaatattgggatcttgcagaaggactgcagacatctggctatgcgggcttcctgaggtcatttcagtgcccttactgtggtgcaacttcacattgtacatgattgaaatgtttaggctttgcttatcacattatgttgggagtagtaggtagagacagtaggagaatagagggttagaggcttattttaaatcagattgggcatgtcactataagatctataaaaaggtttataatctaatatgatgctcataaagagtgctcttccaatctgattcttatggatttcccaggggtgatcccaatctgattgtctttgtagtacagtgaccttcatctttagcaaagccagaaatgcagttcccaaagatgggagagcagcgtctctactcctgagcctagatctgcctttttttctctctcttgtagggaggattttcattttgccctttctatgtacaaatgctttgtgctttctcgtattattttgtatagtcacccaataatcctgtactgaaggagttatgatcaccattttacagatgatgaaataggctcagagaatttgacatttgtctaaattcatgcagctcgtaagtgacagagctgggatttgaacctgcatctgtctggctcctaagcctgggctgtctcactctgcatcataaatattccttgtgatgcagtgtttaggtgggtacagtctagtcctttaatgcttaatgctgttttagggggttggggagaacatagactttcttgagaatttgatgaaaattggacctcttgggtgggcagggagccaggaagtaccctaccctcacaattttttgtttgtttttaatttttaatttttgcgggtatatagcaagtgtatatatctgtggcatacatgacctgttttgatacaggcacttattatgtaataatcacatcatggagaatggggtatccatcccctagagcacttatcgtttgtgttgcaaacaatccaattacactcttgcagttaattttaaaaggtacaattaagttactattgactatagtcaccctcttgtgctatcaaatagtaggtcttattcattctttctgattttttttgcacccacccccacaattttgcatataatttcagctagctcatggggtccctgaagcgcatctatggattatttaggcctagggcagtccttggatcccaggttaagctaattagggtcttgggaagattcgttaaatttttttagagaaaaagcttgagtgattagaaggtcatttccagaaatttccttttggctcttcaggaataaagagactgggtgaggagagaggaggatggtgaggggaagaggaactggatggaagacatgaagaaattagcaagcagtaaaagcaatttgcatttgtgaataattaaggttgttaagaccctacggacttggctaacgcaccattcactagcagtttcttttcaggttaaaattaattggagtgttggtttatttatcttttcccttggtgaatcaaatgactcatcctgatttataaaccttccacctatccactctctattaagacctgtgggggctagcgattgataattttattgagttccccagggacattatttgtagaacccagttgctaatggttaggtcagtgaccgctagagacatctcagaaccccagaagctctggtttctatgaaaagagaaaacagccccaacagttggatgtcacttatatcttgaggcagactttttttagcagaaactggaatatatggctaagggggtaaaaaggaccagatccaagagcttggggatttttagatttcaaaactagatagtttcaaactccccaggaaaggaagagagggctactaaaacaatctcctccccttttgtctagaaaagaccccttgaaaccactattagaatggcccctttgtatgcacaaaaacgacccagattttcttcttatcacttatctgctctcctagaagttttaaaatctcctgacatttaaaaaataaatgacaaggaaatgtttttcccagcctagctctgagaaaggcagtacatccatcccagaccctgctgccagccgttggagccactgcagaggaaatctgaccccatgaacatctaagcaggccgcagagcacatggctgcccctgtggctctagattctgaccacatggagtagactcaaactccagccttaaccagtggtgtgactttgagcaaatcagcctagcagtaaaagcacagctttggtgtcaagctgcccaagttcaagttctgcctaattactcaccagctaagtgatcttatttcacctcttccctgtgcctcagtttcttcatttgtaatatgaagacaacataaatagtaacacaaaaagggtgttatgaggattaattgagtcaacagataaaaacactcagaacagtgcctggtatgtgtagtgggctagaagggcacccttcatgaattttagttattattattatttaagctctctaagtttcaaggtctccacttgtggaatggagctgataatggggattttatgaggataatgagaagatacacttaagttcttagaaaacaatgccactgggcagagcatgactgctcagccagtgttcggcaatcatgagttaccatgttagtgatgagaaacaaaccagtagtcttcttacagttcctatatggattaagacttgaggttgctaaattagccaggtgtggtggtgggtgcctgtagtcccagctacttgggaggctgaggcaagagaattgcttgaacccgggaggcagagcttgcagtgagccaagatcgcgccactgcactccagcctgggcgacagagcaaaactccatctcaaaaacaaaacaaaacaaaacgaacaacaacaacaaaggacatttgaggtttctgagaaatcatatggtgggtggagactttaaaacactgatctttctttactttctgtaccctcataatctttggcactaactgcagctgctgggtttagggctcagggaaaagccaccacccctcttagaacccaagaccccaggctggtatggatatggaatgtacacgtctctcttcttccccactccgctagtttaagcagagtgagcctgagtgcctgagtcctatgtctattaactttttgttgtcagctccactggtaatagtgcttcaaagaaatgaacgtcttaggatccttcttagaagcatgtcgtcacgattgtattaagctgatggaaagcagaacaataacaacaacaacaaaaacaacattcctttctaagccctgtggtctaaagggtaaagtgaatttattaagcatgtctgtgaagcaaaagctctggaggcatggctgctgtgctgattctctgggaaagtggtgatatggagtcatatttgtcactagacgaaatgaaccaggagggcacttcaagaacagaggatctgaaagaatttgggctagctctaaaaaatttattaaataataaaaaaaataaggccaggcgcagtagcttatgcctgtaatcccagcactttgggaggccgaggcgggcagatcacttgaggccaacagtttgagatcagcctggccaacatgatgaaatcccatctctacccaaaaaacaaaaattagccggatatggtggcgtgcacctgtgatcccagctacttgtgaggctgaggcaggagaatcacttgaacccaggaagcggaggttgcagtgagccgagattgcaccactgcactccagcctggtcgatggagtgagactctgtctcaataaataaataaatcagtaaataaataaatccaacagtctcatatattttgaaatgagaccacattaaagaaaggatgctcttgggatcatggatatttgcgggctctacatgggattgggtgagtcgtgtggtggtgacccttagctcagaggagacttctactggggtgcaagtgaaaatgcctgcaggagccaggctggatgcaaggcttaagaagtagtggggaccaggagacacgtcttcaggagcatctacccagctccagtgagttattccccagtgggaatatggagcatgtcttgcagatcttttattcattcaagtaattctgcaaatccattttaagaaatgtaacacttgatttttaaaacctgtatggttttaaatggtttaaatggtttaaatggtttaaatggcctgtatgggtggccattttgtaacctttggctatggaagaccagggagctagtgacgttgtaatttgcaaggaggccatgggagtcatttggaaatggagtgctggactccttcaacttctccctccctctcaactgtcaagagagaagggttcagggcttttggttacccaggggagatacttatctcctctgaacttccccacccacgcaaataatctccttcaatagtggtcctagaattccatccctgagaaggatcttctcaaccctcccattatgttgagatatatatttaaagtattatggaaatggctattataaatggcatagatagtttatatttttaagcctttgtaaagcattttggtctcatgacattcctgcacatcaagaatccctggtggttatcgaacttttatgtgcaggtaggctccccttgagaagaataacaagtaaattcaaaagagaggctgagaatcaactattctcagcacaaataaatttttctgattacaaaagtttccatcacaatgcttttgttgaatttatgatagggtttagttcataaatcaatttgatctacacataattttcaagaaagcatctgcagcataaattgaggtgcaactgcacttcataccactttttttctccttttgtttctcattttccactttgttctgtctgtgtcatctgtaagtatctccatgttttcattcggcagctcctggagacttcatggcaaaccaacatattgaatgcaggaaattccagggtggccaagaatattctccagaaatgtactgtaattcctattcctttaatacataccagttgatgttgggagaagttggccatgtgagaagtaaggcctgagatgatgggattgatgggcatctacatctctaaagctgacagaggaaacatttggcttagaaaaaaatttagtttttttttgtttgtttgtttagtttctttttttttttttgagacagagtcacccaggttggagtgcagtggcatgatctcagctcactgcaatctccaccttctaggttcaagcgattctcctgcctcagcctcccgagtaggtgggaccacaggcacctgccaccatgcctagctaatttttgtatttttagtagagatgggatttcatcatgttggccaagctggtctcaatctcctgacctcaggtgatccgcccgcctcagcctcccaaagtgctgggattaaaagcgtgagcgattaagattgcacctggccaaaaattcagtttttgctcacaaggtttctgcatctgaactgttcattcataacacagggacagagcagagacctggagacatggcttaggatcctggctgtgccacttaagaactatgggacctttctgtagcccacacccttatctataaaatgaggaatataatgtttatcttgaagggtagttgttgaagattaaatgaatgatgtgcacagagtcaaaaccatatataaagccaatatccagcttataatactcatttgataaaattttttcttatgaatgaatgagttcatggttaataaattatctttaaagaagtaattcaaatttagaagccttcagaagctggtacctagatctgacaacagctacgtgtactgtattttactaattctaagatacaattttttcatagtttaaaatctccaaaatcaggaagtgtctcatcattcatgacttcttatggctataattggtaaatattttctttcttggtggcatataaagcagtggcttacttttttgttggtggcaacttagattccatagactaactcagctaggttaactaatttgagctgctgctgtttgccttctcttcctcccgcttctctcacccttccttcccacttctcctcttccccccttcttcttcatagttttattgaaatatgttttatataccatagaattcactcatttaaagtggtttctagtatagtcacagatttgtgcaactatcgctgcaatctaattccagaaaattttcaacacccccgaaagaaaccctatatcaattggcaatcattccacattctcccagtcccccagtcttctcagccctaggcaactactcatctactttctgtctctatagagttgcctgttctagacatttcatataaattgaattttgtaatatgtggctttttgtgacttccttctttcaattagcatgatgttttcaagatagaaatagaggctaagaagtctaagatcaaggcaacagcatggtcaatttctggtgagggctctcttccagggttgcagatggccaccttcttgctgtgtcctcacacggcagagagagagagagagagagagaggagagaggagagaggagagagagagagacaggtgggggggaggggcaagctcactgctcactggtatctgttcttacaaggacattaatcccatcataaggccccactcttatgatgacctcattagacctaattatctcccaaaggctccacctccaaatgccataacactggggactggggcttcaacatatgaattttgggggaatgcaatccagttcatagcacatcaagatatggtatctcgatgtttaactttttgagtagctttcagctaagtttattatctctgctctggccctggctttcatcttggcccttataagtttaccatgaggctcatagtctgcatattatagatgccaataccatagtcatttatttatttatctaatgaaagttaattacctgatctatgctggaaactgtaaataagtaaaacaataaatgtaatcagggaacacagtctagaggaggagacaggcaaaaaaaaaaaaaagcaaaaataaaagacagacaaaacaaaacaaaacaaaacaggtgcaatctgtaatcatgttcagaagataaagaaaagaccatcccgacagaagagggcactggcctgatctagtggggtggtgaagtagggaaattaaagaggagaaagacattttggacaggactccatgatgaattggatgtggagtgaatggaaggaggaatcagggtccttctagccttctagtgtttggcttcaatgacaagtcgctggtggtagcatttactgggaagggaggggctgcactgggggctaagggctgcactagggagaaatcaggatttccatcttggatatgttcagtttaagaagtctgtgacacctgaaagagaagatgtcaaacagcagggtagataattgagtccagaactcagaagagaggaatcatattacatttggaaattacaaagatgactttgaatgcctgtgagttgatggtaccatctggggaaagagtgtagggagaggagagaaggtgccccaggtgaaggcaagaggatgcccaacatttagagggtgagtaaagcaggaggaggctggatgggaaactgaggaagggcacacacagggcaaggagatggcagaagcctagggaggagagggtttcaggcagagggagtggccaattgccaagcactgttgagacagagggaaggtaagggtctagggtcatctgtggagtttgtgacagggatgttgctggtttctttgacattgaagctctagtgagtggagggagggcctgatcaaagtgggctaaaggatggagcctgcagtagtctctggaaatgtggttggctatggaggacagttgagcaagcttatattttggcagcagagctccagcagcaagggagagcttgctatagcaacacagtacagttagacagtacagggctgaaagagtgtctgtggagggcatggtgtgttatgaatgaagaggcagaggatgtgctgggcgcctgtaagtgcagtgttggagagctgctggtaggaaaaaaagtgtaactggcctgattcttttatgtgacttttaatgacatgatgaggcgaggccatccactgagcctgatggtgcagaaaagaacatgggaggttggaggagagaaggaaaactgtgaaatagtggccttggaaaattggaaagcaaaccaattcaagaaaaatagcagtttgccagtcagtatggagtgtcaatttgcagtttgagatcatgaatttaaagcgaaaccagtcatttcccttgtgtggttttattcaggaactttcagctttccagagctggtgtgaagtagggctgagggcttctgttatggaaggagggtgctgcccaggggtgatgacaatggtggactatgggaattaggctggacaaggagcgttgcaaggcaaggcagggagcagatgactggccaggggtgggatgtcgggggaggtgtccagaatttggagatttctctgaggttggggaagggtcccagtggggagcacgtgaacaggcgagcacaaggatgagaggttgctgttgatgaatggggtgtttgaggccgagatatcagaaacactatagttgctgctttcttcgggtccagagcaagatcatgggagtgggtgggtggcgtggaggaaaggaaagggtcaccgacaatcagcagagcaaggacctgggaggccagcacttctggtggttggtctatgtcctggtgattaagatgactggagttggggtggagagggcagactgagagctgggagctatgtcccaggccataatcactaggcccacttgtaattgtgtgtgtgatcaccagacattctccaaccctaactttttgtctcctgattacagtttcaaacttaaaactgacatgcaggagtgactgtttcagaaatgtgagtccatctcttgctgctcctttctgtctaagggctgattgtattggtgatttggttcttggagatgtgagtgctcctgccctcatgaggaccttccttagacctcgcctactgcctttgattcctgtggagtataaaagtcaaaggatacattagggggataaggatgataagcaagtccaagtataggtgctgaaagctactttccaggtctccaactttagctgtgctccattcagccagggttagagccgtttttgctcgttgcagagtaccctgtgaatgttatacatcataattgtatcattacacgtcataacaataggatttcaactgttattattgcacattctaattatgtaattactcagtctttcaccgattatgtaattagatttaattacaccaattgcagaaataaacgatagtcaactacaaattacttaaaaaaaaaatccagaactatgcatacgtcggcaattgtcccaaaaataagaatagaaaacataaggaagggaagaaggcttacgaaaccaattagcaagtgaaaggaatgatgtgatttggatagatctttaaggataatggcagggaatcatcttgtctagaagtttcctgtcattttttttctctgacgaagtgtggtagtaggaattgaagatgtcaaagtcaagagcgctgattcctcttggctgtgccttgaagcagagattgctctcatttccttaaccatacagcttaatgaggaagagggaagagaagacagcaagagagagaaaagagcaagagacactgagcaggggagggagagaaggagagagagagaatataacaaattggcatttcataattaaaagtagtatacatacagtacttttaaaaatatatatttttaatttcagtttttattttagatacagggggtacatatgcaggtttgttatgtgaatatattgcacccaggtagcgagcatagtacccaataggtagtttttcaacccacggtcctttccctcccctctctagtagtccatagtatatattgttcccatgtttatgtccatgtgtgctcagtgctcagctcccacttataagtgagaacacgcagtgtttggttttctgtttttgtgttaatttgcttaggattatggcctccagctccattcccgttaccacaaaagacttgatttcacccttttttatggctttttaatattccatgatgtgtatgtaccacattttctttatttagtccaccattgatgggcacctaggttgattcaatgtatttgctactgtgaaatttcatggcaatgagcatgtaggtgcatgtgtttttttggtataattatctagtttcctttgggtatatacccagtagtgggattgttgggttgaatggtagctctgatttaagtgttttgagaaatttccaaactgctttccacattggctgaacaaatttacattcccaccaacagtgtgtaaacattcccttttctccgcagccttgccagcatctgttgttttttgattttttagtaatagccattctaactggtgtgagacggtatctcattgtggtttaaatttgaatttctctgacgattagtgatgatgagcagtttttcatgtttgttagccacttgtatgtcttcttttgagaagtgtcatttcatgtcttttgtccattttttagtgggattatttgcttgtcaatttttttaagttccttatagatcctagttattagacctttgtcagatgcatagtttgcgaatattttctcccattctataggttgtctttttactttgttgatagtttcttttgctgtgcaaaagctctttagtttaattaggtcccacttgtcaatttttgtttttgttatagttgcttttaggaacttagtaaaaaattctttgccaaggctgatgttgagatgggtatttcctaggttttcttcaaagattttatagtttgaggtcttctatttaaatctttaatccattttgagttaatttttgtacatggtgaaaggtaagagtccagtttcattcttctacgtatggttagccagttatacccacaccatttatttaatagagagtcccttccccactgcttgtttttgtcagccttgttgaaaatcagatggctctagatgtgcggctttatttctgtgttctctgttcagtcccactgatctatatgtctgttttttttaccaataccatgctgttttggttactgtagccttatagtatatttgaagtcaggtagtttgatgcctccagctttgttggtagtttgatgcctccagctttgtttttttgtttttgtttttgttgtttagaattgctttggccactcaggctcttttatggagtcatatgaactttagaatagttttttctaattctgtgaagaatgttattggtagtttgataggaatagtgttgaatctgtaaattgctttaggtagtatggccattttaacaatattcagtcttcctatccatgagcatgaaatgtttttccatttatttgtgttgtctctgacttctttcagcagtgttttgtagttctccacatagagatctttcacttccttttttagctgtgctcctaggtattttattttctgtgtggctattgtcaatgggactgtgttcttgatttgactctcagcatggatgttgttggtgtgtagaaatgctactgatttttgtacattgattttgtattctgaaaccttgctaaaatcattgatcagttataacagccttttataagaatctttagggttttctaagtaaagagtaatattatcagtgaagagaggtagtttgacttcttcttttcctatttggttgccttttctttctttctcttgcctggttgctcaggctaggacttgcaatgccatattgaataggagtaatgagagcgggagtctttgctttgttcctcttctcaaggggaatgcttgtagctttgcccattcagtataatgttggttgtgggtttgtcatagatggtttttattattttgaggtatgttcctttgatgcttactcttttcagagtttctatcatgaagggatgttagatttaatcaaaatctttttctgaggctattgagatgatcatgtgtttttgcttttaattctgtttataatgctaatcgcatttattgatttgcatatactgaaccaaccttgcatcccagggataaagcctacttggtttgtggtgaattaactttttgatgtgccactggatttgatttgccagtattttattgaggatttttgcatctatgttcatcagggatattggcctaatgtttttctttttttgttgtgtctctgccatcttctggtataaagatgatgctggcttcatagaatgcatcagggaggagcccttcctcctcagtgttttggcatagttgcagtaggattggtaccagttccttgcacatctggtagaatttggttgtgaacccatctggtccaggacttttttttttttttttggttggtaggttttttttaaattactgattccatttcagagcttgttattggtctgttcaggttttcactttcttcctggttcaatcttgggaggttgtgtgtttccaggaatttatctatctcctctagatttcctaatttatgtgcatagaggtattcataatagtcttcgagaatcttttgtaattctgtgggatcagttgtaatgtcatctgtgtcatttctgattgcacttatttgaatcttctttttttgttaatctggccagctgtctagcattcttgtatattctttcgaagagccaactcttggtttctttgatatgttatatgaaaaaaggtagtacaatatattttaatgtggagaacagagtccatgttaaggttcaaatttatgattctcccttggattagtttcctaaaccccttttgagtttgttatctgaacctagaacttcagagccagtactctatcatgttctgttccagcaaaatttgcaagaccaaaaattaataggtgagaaaccaagaatttggtacatgaataaatgtcatactctattgtttttcttttccattacctcaggttattgggtagctttgatctgaggtgcctataagaattcaattagggctgtgtcacaggtgtgaccattttttttcctatgaagacattgtagagggtggtctttttctggagaacaggttttctctgttgtaactcctagaggtaagaaaagaacagtgatagctcccctaggctgagttcactcagctgcctctgtgcctggagaaaggactaacccagagcttctagagaggagaggcgaagagacagctctgtggaggcgggaatgtgcacacatctgggagagtgggcatgctacacttgcactcttccaaagagagataattggtaggtgccatttaagcatatatatacttaggagaaattacccactgagcttggccaagtactgcataaccatagaacaccagcattgctcagcatgttccccaggatcttacagcagttgacaggatgaggattacttcataagaacacataatagttggtgcatgtacttacactgctataaaaataggtcttgatgctatagagggtcacattggggaatcagtgtatttgtttagctcttgcctgtgcatgaaaaactaatagtctgcaataacacaaataaggaaaaaatgtagttttaaatatagaataaagccattttattttgagcttttctactgtatgtttgtctatggaatcccataagatggacagtagatgctaaagaactttaatctagacatattcatctctcctttggtttatgcatagctccaggattgcatttgatttttttgctgttcatgggctttcatttctgcgcacaggtttttaaaacgttttatttacttattatttatttttagagacaaggtcttgctatgttgcccaggctggagttgtgtgatcataacttactgcagtctcaaacttctgggctcaagtgatcgtcccgcctcagcctccaaggagccgggattataagcatgtgccaccatgcctggctctgcatacaggtttaatgcctgttgaggtcaacccacagcagtggaaggtggcccctagaatagagtagtgctcttacattgggcatttgagcaaacaaaccctgggaaattggaactaagagaagggaatcaagctggaagtttgtagcccaaatattcattctcatctacaaaaatccaccagaacaaataaggttaagctgatgcgtatccgcagatttgcaacagtgtggcattccactctctacttttcttgtcagaaactgagaatgtgtaaaatggaagatgtggcgatatcaagcagccaaagctattttccaaatgaggacaaaagaagtgcggccagtttacacaaagcaagcgaacttgctgagcagttataatctgcattccagattctcagcccagagccatcattcctggcttgctcttctaaacagaaatgtcaatgcaaagattaaagtggattgtagtgaggtagaaagttgtcagcagggactaacatcagagtcttacaaaggcattttacctagttaagcatttatggtatgcacgcaattttggccatcacaggctcaaggagagggattctacaaaatacatcacatcagtataggaagggccacacaacctgaacagacattagcgaggaagacaaggaaaggctgtcatgcagttagtcaccagtagcagccgttcactcagtggatctctaccagatgttcaataggtcaggtactggcttgcctggctatcattaggggattctgatcttagttctagtttgctctctctaggtctacaagcagcttctgtatttattgagtacttactaggtgcaaagtgccatgataagccttttacaaacttattattctacttagtagcactactacgattttctttatttgcttgatgaagaaagaacacctcagaaggtttcaatgtccacatggttagtaataggaactagagtttgaacccctggtctgaatccagagtccattttcttaacctctaaattatgcaatgtgttatattccaatatctatagaatgcagaacaattttgtcattgtaaagatactttaagtgtggaattaaagtttgtttagggagagtcctctattaaatttatgtaatcagaagagctttagattaacatgggacaagactattaatttcttcttcacataatctagaaaaaaaaattgacaagaaaatgttccattttgccttcaaatgaaagcggaaatatgtggttaagtgtaagtcaaaaattagatgtcaaacatctttccaggtgcatatattatataatattaaattgtcaaggaactccttgtgttggaatgcaagagaggaaaatcctttttgtgagtacaaaaaaatcatatagacataggaagtgaggtgggagcagcctgatcctaataacaagcatggtttgataaaggaaacactagcaaactagtattgaccatagacttaatcttagtgagaatgaactaagacccgcccccccctccctccctgcctccctttattccttcctttggctctccatttatttatttacttgtttagcaaagtttattgagtacttagtctgtgtcaggcacttgtgtaggttttggtgaaacagtgaacaaaacacacatgttttctgcttttatgggccttgcattccagtggagatggccaaaaacttggacagttgaagaaacagaaagaagatgagtatggttagagctcagtgggaaagagagagagtaatacgggtggtaggagacttacgtagaggcaagaggtccagttcccagttagacgaaaaaccaagagcagatagaagtttggcgcatgactttacatttgacaacaggtaacagttaatgagcccttaatcagtgccagtgactgtctaagcccttgtcctgttttaactcatttaaactccacaacaccactcaatgaattcttaaacatatctactaaatagaaaaacaatgaatccaacgtcaggttgacacatttttttcaaactcttttattgatttaacagtgagttagaacacaatgagattaattaaacctctttttttcagttttaaaaatggtgatgctgtattaatttaattgtcttagcacttataattttttaactgagaaaaagtattttgtatgtaaagagattgttcttaagctttaaattaaacaaatgttctctcgccttatggggaaatgggcttatttgcaaatggacccactcaatggttttattttgttctgttcacaccatactgtcatgttgtccatagattcattagagcgagattggtgcattaattcattccattattctgttgctcataataaacaaataatacagttttacatcactgcttctatactattagctcatatagttacaaatagtctttgtagaattgcctacccagaggtgtcacttcagaagctagtgataactctacaaatttttacaatttcatagacttttaaaaagtcgtcctgattttttaaaaaatggttttatatttagggagagtgatgactagaaggagcaggttatcaaaatctaggctgatatgagaggacaaattcaaaggaaagttaatgttaagtgatttaaatacttggttcagatggacttcctaatggaatcttcatcatatatgcagcatggagtaaaaactataagaaaccttcatcaatctaagactgcattaaaaattactatattttttgaaggtttaaatatattcagccttactggaaaaattagagcatgttgatttatatccagtaagataagttactctccaaggagaccctttgggttaaaatcctcacccacactcctcttcatctatgtattcttatgtggagattttaattcatctttttccattgttgcttgaacacctgattccttgggttggcttcctggagaaatgaatcagcaagagaaacatgagctgacttcctcctatttgatatgcacacatctctagatttttagctttgctcctagtatgcttcgtgtcaagtttaggtccagcttcctgagctagagcacaaaaaaatatatcatttgaagcaaagagagaagaacgaactggggcttcaatcacctctgtgtattatttctgatatagaaccaataagtttgtgtgcccactgcatagtaacagacccattaccctgagacagcaggtttgcagcagagaagggtttaactatctcagggcaccaagggaggagatgggaggagagcctcaaattcatctttctgaggagctctgggctgtggtttttaagaacatcatggagcgtgatgggctggaaaattggggttgttgactgatcaggggaagggggattaaatcatcagaatgtggaaattgtgttctttggtgagtcagcttcttgtggtgttcctcagaccttcctggggtcacccgtggggtctttcattcagatcagctgatgtagtagtttcactcgtatgcaggacctgaaagactacctcacggggaaagcttaacatttcttaatgttcaagttgttatctatagagcacttaaggggaactatcatcttatcacagagtctacatgattctaggacaataggcaccaaaccatgtcgaggaagcaggtcagagaatgagttgacctcatgcttaatgctgaatgtgcttcaagcttggtttattaatttattttttcccctttcttcttccctgattaattttataatgtttacaggggcaacttcatttcaatcttggtttcccagttatagaagataaccctcatagaaggagaaaagtgcatactcattagtttcagaggaatgacttttttttagttttaggcatttagattttgtgatgcctaatgacacagaaattgaatgccctcggggagactctcctgtggaattttaactatcccatagccttctcaggtcttggacctctcatggctagtgaggtcaaatggctttgctgagtggtgaatcttgttacctccaaggtcattcccattcttcttcttgcacacatgaggtgagataacctgaaactcccctgaaacacgggaagagcacacaaatcagtcctttgaatgcacctcatcctctagggattgtagtaatattgtaactgatgtaattgtcatataatttaagttcttttttctttctttcttttttttttttttcctgagagggagtctcactgtgtcccccaggctggaatgcagtgatgtgatcttggcttgctgcaacttccacctcatggattcaagtgattctcctgactcagtctcccaagtagctgggattataggaacccgccaccatgcccagctaatttttgtattctattagagatgaggtttcactatgttggccagactggtctcggattcctgacttcaagtgatctgcccgcctcagcctcccaaagtgctgggattacaggtgtgagccatcacgcctagcctaatttaagttctgaattggtatgggactatggggccatttgaaaccatgttgggagatgggacttccctagtatcttggtactgttgaattataatcagtttcctccaggtttgtctattttctccctcaattcatttatttttctcctcctccttaaacatgtattgagggcctattttgcgggtaccatgatgatgggaacccagacacaaaacaccaaggctctcccctcaggagctcacagtctagcagggaagggagacagatacacaaacaaataaattaccacttcatgagtgatgagcgccacaacagaagcacccaggaagaaaagcctagaaaaaggttcagttacctctgggtgggaggaggatcaggggaggctttctggaggaggcagccactgagttgagtgttcaaaggtggatgagtaagagcttgcaagggaatagcatgggtgtgaaacagaggagtgaatgcagcagcccgtccattcttagctgctgttcattcttacagatgtcaaatatttctgggagtcttctgtcttccactgttacaaaacttctttaaaaattgttgtgattaggataggacccttcttcatagcaggagtttcccagttctttggggaatgctttgaaaaattcatttgttcccggattgagctgttctagttgtttatcctttaaacagcaagaaaaagatggtacttccagacttcttaaaagcccaagccacttgcaggtaataacggtgtcaggttaacagcagtgacacatcttctatttcaggaaggattgaattggctcttcctggatattcatttgctgaggcttcaattccaggagattttattctttgcacatttctctgttttctttttgttcctgttagaggcagcttctcagaatgataaaaactgttgacatgttccttgcaaagtctttggcattctaaggatccatccttattgcctcatttggccttgactttacttccaatataattgcccatgacaacttattttagtagagagtgtggtagatggccatccttgggtgagtttgagggtgctgtaaatactcctatactccaaaacatctcttctaacttgcaaagtacctgaaattccaccaattagacattcattcttgaagccttttcagttgtttcttaaaatctaagtagctcttagtgtcaccctgcaccttcattaagcaggtatcacttgttggctcctcagtgtggtgagcactgagttctgggaaggacaaaacagggactgaaaaactaaggaaaaggatggcttagcctgcaccaactgtacgtgaaggaagagagtcattatcacatcagttgcattattcagcacagcttgttacctgatatctgcttacctgaagagattactgtgggttaattctagaagcttgcttattacattaacgacctacatttattgacagctgattatcttgggggattgtctctgagaatttgtgcagtaggtaaatgatgtctttgcctcaattagcactcctttgagaaaggaactaagatagttaatgttgatttgtatcactgtggtttcttatccctcttttatatcttttggaattgaacacagtattatacctataacaggtgctgagtaaatgtttgttaaagaaatcagtctgtagacatttagaggcacatatcaccagaaatagaccactagcctgatgtctggctacagtaaaaccaaacaggagaataactgttttttaaaattagaacttcattttgaaatagtttaagattcacaagaagttgcaaaaacaggacagagtttctgtatcctttccaagctttccccatgatagtgctatatgctacataggcatgcatggtatgttatcaaaaccaggaaattgatattggcgtactgctgtaaactcaagtacagatgttttgccagtttttacaagcacttttttttttttgctgtgtagatccaagacattttatcccacataaatttgttttattacctctccagtcagtatacagaactcttccatcagcacaatgaaattctcttgtgagaaaccaaattttaaaaagaaaaagaaataacttaaaaataagcaccaacatttttataaggtcacatgcgtgaactttaaaataatactaatttcaggctgggtgcggtgcctcacgcctgtaatcccagcacttaggcctgttctactctcctttgaaatgaggtccttccccagcatgccttcctgctgagcaattgctgcctggagcatctccctgagtgtctgctgtgcagcaaggtggctgccactttagggaatctcagcctgtgctccttttccaagttcagtgtgtattgtcttctccgtaagtccatgtatagagggttctttttccctgtgttagcatttgtacacttggcctggcttcatggaaactccaaactagaatggacttggaacaaatggaaatccaccaaacaaatatgaccgcatggtcacagcagcacacagacagaactttcctgtttctgatttaccaacatagggtacagagctcccaccacggttaaaattgagctaagtgagtatcaaacacacttggtcactttttaaagagaaagcacattacctgaaaatggcatctttcctcttgtcaactcctgccaaaagaaagcctcaccccctaccccctgcacaccccagaattcatactttcaggcagccctctggaaactaaggacatctaaatctaaaggtcaggattctgtgagagaaaaccagtccaacatgctcatgaaatcctaactgtgcacagggttggatggacacttaaaaggcagttaagttgatggcttgacggtatgactaaccaagttctttaggtaattaatagtggatgcagcagaagtgttcactgtaatttttctatgtgcctgggtgtgatcacatgtatacaatttgtctataatctgttatctgtaatttgtctataattgttggcatgtgtctactatgtccaggtacccctatttgaggtactgaaatatgttcattttatgtcgattctaactataatttagagactgctctccaaatagcagaaagaacagcttcttactagggtgggtttttttttttccagaagattaagagacatgtgctgtcatttcttcatgacacagattcctgcaatagacatgggggccgtggtaggagagagaaccatgtggtttaggaaattgcttcagtgatactgtggacctaatcccctcttcctaaagaactctgacagcagcaggccctgaagaaggggtatttcccaggatattaagatactgtaattatatggcaacaatgatgctcatcttagtatgtgcataggttacttttttccgtggggatttaatttgactaattgacctctgtcttcacaaccttctgcttccaattcctactctatattgtccccagaattaacttgctacaagacaagataatggtaccactctccagcatttaaatttctatcaggctgggcgtggtggctcacacttgtaatcccagcactttgggaggccaagacaggtggatcacctgaggtcaggagttcgagaccagcctagccaacatggtgaaaccctatctctaccaaaaatacaaaaattagccagccatggtggcaggcgcctgtagtcccagctacttgggaggctgaggcaggagaatcgcttgaacctgggaggcagaggttgcagagagccaagatcgcaccactgcactccagcctgggtgacagagtgaaactctgtctcaaaaactagatttaataaaaataaaaaataaataaacttctgtcagctccctatttcctataggataaagagcagacatgcttccagggcacacagatgcttcaccgtctcctgtctggccttgtttcttgccaaccttacaatctacttaggctctatacgaggtgtccttccactcccagaatgcactgtgttctctgtgcttctgtctctctgcccaagcttagccctctgcttccatcccttcccctgccttctcacgctgatgagtttctaatcctcactcaaggcctactgcaaaagttaggcagaggcgatcttctgcttccagagtcctttgcttcttacttatatttgagtactactgatcataatagctaccactgacatagcatccatcatgtgctggccactaacaaagcagttcacgtttactaactcatttatttctctcaacaacctcaggaggtaggtattatttgcattttataaatgaggacactgaggcacagcatgattaaatatcttatccaaggtcatacaaggtaatcagtagaatttttaaacaagctgctcttgcatatctgctgccagaaattaaaatctgggtagacttctctgctaaatggaaaactactccagagcaagaatcatgtcttattgaattatatgtctccaaaaccagcatagtgcctgtcaccaaagaaaaaaactcagagacatttgttgaatgaatgtacagactattatgtttttgttcaaaaagataatcctttgaaaagatgtcattcaactaagcctctgagtttttaatctataagagagaataaattgtgatcaagtggaaacagctgcatctcaaggaatgaggaaggtagtgtcgggaggaatcctgtgttttgcttctacctgcattcactcccatgttctgggtggtgctcaagtttcagtgggtatgttaaggtctcactgagtgtggaaagtgaggcagtgcactgctcattcacactggacctaagttccctatcaaggcctccatcatacacgcagggaatcagaaggctgaactcctggagaacattttagaaggagtaatttataagcacggggcttgctcttcccctgtcagaactaggaggcaggaattgtgagttaggactagaccgtaccattttttgagttgtgttcaatgtaccagagatcataaaaggcagaagaggcaagaaaaatgataacaagccttatattaagcagggagtttacaggaaactagtttttagatatccagtgtagccttgacattagagcgaagcttgatgaatctctactgaatttaaaacagtattattactcctttaagagaaatgttaagaaatatatatatatatatatatatatatcacatatatatgctttttgctgatgaattgattttgataagaaatacctttgagaatcttgctcgtaactagggttctgctaaatggtcaatatgtatgaggtgagctcactgttcacctgtcattcatgctgagatgaagaaaagatggcttcacttgagagcgtggttaacttcagggttataaatggctttcaggggtatagatgcatagagtccctacccttgcaccacccgagctttcacgactgttgggttccttcaacactacattacgccttgagagtcatcatgagctctgtaaccaaagtgttaaggatgttggcacttaactgtctcttatttatctgacccgcttcagctctgcttctataatgaactgtaactacaggaaaccatggtgtgtatctttatgtaactgatgccttgtttctcctgaattttcacaacatcttaacaattatggttgatgttaaaaactctcatgaggttatttgttgaagtgaaatacattataaaaatacatgcatatgaaaggatggccagggaagccatttcattgagtaacggccagttctgtcctcaccttccctctgtctcgcccctcctcgtccccaaagctgcctcttctcgcgtgtaatgccagcgctctgtacagtgttctgtttagagtggtttgaacatttttctgcctgtgtctctcattgctgaagtaactcacctctctcatatcgactcttacccaggagccgcactgcagactctttgatgtaggtcctttctgcatggcagctaaggccaagctgtggttttcatttgcatgatgcaacctccccctttcggttgtcgcctccaggttaaccagattcttttcctgcactgcccaagcatgttgacgtgctttccccgatggccctgaacgtggtgagcactggacgcatgcatgaattaaagcagcgagcattccaatacactgaagcactgggcctgaggcttctcctggatcatccctgtgggccctcagtttgctgtgatatcacaaaggccaccatgtcccttgaaaattcaagactaggacattggaaaagagagagataaatctcccgtttttaggtttatgctgagcaaagactaatgacaaataattagaagctaggaccagttttccaagtaacaacctacctgatcatcagtcctacatgttcctgactccacctgggtgtgcaccaagtgaccaggatgatgataccctttcatgtctttctgaataatgttacctgatttgattttgcttagatctaacaaatatctaaataaaaagatataccttttaaaagcacttcttgggctaaatgcctcaggaaatgcaattattgatcgttttcatagtgtttagtaaaactattaattcaactttaaaagaaatgaaatggtactactaggaagaaatatcgcatttgttaaagcatgttggcactgcattcaacatcattgattagtaaattgtgatcattttctctccttgaaatattttttttttgccttagggctgtctaatgacttactttaaaactgctttcttttccttattttttttaaacttgtatacttctttcttgtattctcagaatggacttttataaaacacaactgtcaggatctgttttctcactgcatttctttttttgtcatttcaaatagatactttgcattttagacatgccttggttgtaagctgagaaaaatgaaaggcgaggcattccaagctgtgataatcctagggtaggaataacagttcctagacaattcttgatgatactagcttgtcagcatcccttagcccaagagtaggcactaagcagtcagaatgaaacaaagccgaatgcttcttatcttatttttaggttttcttcatgaaatctgatcttctacaatctgggggcttagtagattgaagctcttcccacagtcctttttcctcctattctattaaccatatcccatgtattatattgaaatggactttgcttagaatttcataacatgttcttttggtaaccagtaaaaagatcctttgaatgggagcatttcgctttttgaaaggagcttaaatgtaattacagtacagacctgtgcaggcaggcgatcctgcccagcacgttggcatattctcactttatgaacgttttcatctgggggcttggcgaaggaaacatctgattctcttttgtgagattcttcagtacagagacccattcctctttcccagaaaaacacagtgattcctcataaaatgaaaggatttctgaagcccaacagaaagtggggatacagagatccattcacagagacagaagagaaaatcctaagaaatcggcttcctggggccatcctaggcctctcacagagatgtttttataatgataggaataacatctctagagaagttcaaagataggacaataaaattaaaagaagggcctgcaggaggaagcaaggagaaagacacttcaccccactgagcaggtaattcatcatatttctttccaaatttatacccaaaaatctagtggatgtcattgatatggtggaaatagctatttattattatttttctttttttgagacagtctcactccgttgcccaggctggagtgcagtggtatgatcttggctcactgcaacctctaccacccgagttcaaaccattctcctgcctcagcctcccgagtagctgggactacaggtgttcaccaccactcccagctaatttttgtattttcagtggaggtggggtttcaccatgttggccaggctggtctcgaactcctgactttaagtgatccacctgcctcggcctcccaaagtgctgggattacaggcttgagccaccatactcagccagctatttattatttctgaaacatgggcaggggaaacctaattttgataaataaatgattttcaatgttaattagaagcaagaaggaaagaaaaaaaaaggaaaagaaatgttccaggagatgagacattactttcatgaagttgtcaagaaggaaatgaaaagtgtgcatacttgaagatatgattgtataatcataggggttaataagtcattgccattttccctattaatgatgacagtttgttttaaaggtaactcatcctgtctgattttccatggtggtgttggtttctactgcccaggtcctttatgacattcctaaggagtgactctagccttgtactcagcagacccatgacttctaatcagcagcatctcagacactccgttttggctgtgaggctgctaggctctcaacaaaactcctaaataggaaaacttacaaaacttccaggccttagctgtcagccaaagacggagctaagacacagctattttatttccttgtgcaataaaggtataattgtcttctatgccagatgtcagaaagacttctaccaggtctttctctgtgtgttcttaaaaaaaatcctcaacaacaacaacaacaataacaacaacaacaacaacaaaacttcaagatgttagaaatagatataagccattataattatccttcagcatcacatataaattcatgtgtaactttaaacaagctggtgtccttgtggtgactatctatgttatgtgacattgttttctgttcgtcaaagtgaagcagcagataaatggaacaactgttttttaaacataattatttttttttccagatgttctcaggcttcctacattcaggatcagcaagtcttcagcattggtactctttgttagtgtagaccttgagtgccctgctgaggggcttgtgtgccattctgcttgagtgcagatgtgccaagaggtacaagagttggaactgtaatagacctcttaggctactggctgaaatactaaggttcagaataagaaagagatacgtctcaggcatctcattatccgcaactgtcagtccggaactcagaacaggctggttctagctgtcgattcaatagttttagcttctgtactccaaatccttacaggtagacccatagcaaggtgccattgccagggtcatgccatccaggtatgacaggactatgtcaaagccaggtaggagggcaagaaaagggagtataaggcataagttaaataggggactggtgagatgaccaggggaggcccaaagagtccaaggcaaacatctggagaaggctcagacagaattttgaagtctgcatctagtaacagcccaaagaagtcccacagtgatttgacagtctgttatgctatgggagtaccagcctacctgcccaaccgtgccctgattggccagcctttggcaaatagagagctcttcttttctcttaggagcctctgccatcccctgtatgaatatgagggcttcttatttgggaagccttgatatgaagtgccttgaaactgtaccctgagctactttctctaggatgccctctctttcagaaatgtgagctccaggctgttgctccccaatggctaggggttgttggctatccctggttatagattattgtttatcagcctcctagcacataggtggcaattttaatatccagaaaaaaaaggcataggaagcagaatgtagtggttacatgaatagtctattcttgtttccctaggactaaattcctgtagatgtgagaggagtatggatccaggggtcagaggttccattccccatgccagcatttgtgtctagattctcagctctccattcagacctgggacttctcttctctttcctttcccccatttctaatcacctcatctaggctgtcctgttttgtgagtggtcccagagtggggttggggttggatggagagcatatatttgtgctgggaggctggggatgtttgtgtgtacacgttgtgtgggtgcccacccacatgaaccactccatacctatacatggctcattgaccctgccctcgaagaactttcactctgtcttctggtatatgtgcataagtgcatatgcatttagtgctatttgaatcacctactccatcccattccttttctagataaataagggttccctaaaaaaaagggatggctagaatcagtggagggagtggaacgagtgagtagaattggtcagtcatgattcctaagacagtttagtgaaaactaaaatcaagcaatacttgtttggaaagactctgttttatgtagtagcttagctctgatttattacatagaagttgctggcaaatatgaacactaattctactctggtaacaactgtgattgaaataattgtagtctgcagataagctggagaaaacaagcattagtgggtaggttgtcttggacatcattccaaaagtgtaacagtgaaaaagtacgtgctcttagagaagaaaacttacaagagatatttacaagacatatgactggttcagatctctgcctcttatgtagatccgtgctaagccaaccaggcaaggaaagctctcatctctaaaaaaaaaaactaggaaaaaaggagaataacaaactcctgtggccactcattaaagtgacttatggctttctctgtcaagaaatcttggctaattatttagcatttatgagactgtgtggctgccttcatggaaatataattttcactttttcttctttaatactctatagaattatactaggcatttgtgaaatcttacagtagcccaatgcacagcctgttgggcatttggattacagtgcaacaccagataaagaggcagtaaagcagatacaaatgaaaaaaatagaaacaattgatcctatcagtttttgttcagttgaatgattgccttttgggggcattttctacaaacagttactattatcactattattattaccttagttttggaaattactatcacttttgagtgctgagtcatctgattcagtcttagaacaacgttgggaattcgtaaccttatccccagtttacagaagagaaaacaaagacttgaagaggtcaaattatttgcttaagatcctatagctaggaggtgatagggctggaactttagctcttccattgaattctaaaactacctagctgccaaccacttttgaggtcaacttgtaatgcccgtattttgcttttgctatacctatctaggtctatcgtggataagaaatatggaatgaagatgggaaaggagactcttagttcagatataatattgaagtcttgttagataaaatttaaaagaacttcataacaaacaaaagggttctcgccacctgagtttcttgaaagcaaatgatctgtgtgtgttttattgagaaatttataaagaattgacatattccattctctctgttagcaatctatgtcattttctttgtctcctagaagaatgttttactcttaggaataattattcaggtagacatcctgagccttacaactgctctgaagtcaactgctatcattgtttcaggagtctccatattactcaaagctcaagaatacagagtgtatatggatgctaaagagttgttagggtttttatactactttccggtatgctccaattcatttcaacatggaatacatatatttgtggctattggatcacatctcttcaactgagcagagctataattagaagcctgctgccatcaaaaggattaatagtcctgttgatacaaacccataactgatgacttcccagtaaagccagttaaacaaccagctggcatgggatcataatcgatcagtactgcagagtaacaaaaactgttttctatttacattagagtcatttcaaggtctaagaaaaatgttttaagattaaaaaaggggggcccattttgatgttatcatcattactattgatggatgattgaccacaaactgacccatcaaaggtgaccacatcttagaagataactattccatgatgtctgggataaagtgaagaggctttattctgtttggtaaaactaaaaactacacaacttattgaacacacatgccccgtccagtgtaaacatgagaagaatcgatattagaaagataaactcttaggtacacagctctgataagataagtaaaatggcagcatgaagaaaaccaaaagaatacaaagctttcagcttggatcccgtcaggttcagggcagtcttggggtgttgtcccaagttcaggagaaaatgttctatataaatattattgctttctcaatgatgaattcatatcatgtcattcacactaaatccattattgttattagctcacaaaatatttttctgtgatcttaaattttatgaataataatatcagtttctaatttgaagtacattgcaaagacttgcctccttttaaaattagtctgtctcataatattctggctggctagatgcttttattccagtgtaggcagtttatccaggatatccagaggtagccaggaaagcttcaaatcacttagacctactctcttggttatagatagattccataaaaatccatatccatatgatatcatcttttttatttattttgattggatcaaatgggatgcaaagcttattaatcatctagttcataattaagagtcttcagagtgtctaagtattatcagctttcattatcttcatccttgttctcctagaataggagagggtgagggaaaattgggccacttgaagggtcattcatctttaatcagttggataactaggagttatccctctataagcagaagaacttcccctcagccgatgggatcagtcttcctgataccaccaccccacacggggtcccagagaggacttctggggattattagtgtcccacatgacagtctctacagagcagggttagggttaggtacaggttgaatacatctgcttcctctgcattttcctagaccacccaacagacacatcagttattttctagggcagtttgtcctcctctatgaaggatttatgaatcagtcaacccccatcatttttgcatgagccccaggcgaggctctgtagatagcagacactatgtcttatgcttcctcttcctctccaagaaggctgcactccatctggagaggaagtggtatggcacaaggctagtgggtctctatcctaactctaccacatagctgcagggtcttgattggatatctgagcctctgcttctctgtctgtaaaatggggattatagtacaatatctactttattctgccattttgtgaggaccaaatgcaatagcatatgtaaattttatacaattgtcaggtattattacattgaattgaagaataattgaatatgaacataatgaggcagtttagaatttttttcctcccagtagcatgggaattcagagatgggagaggtcaatgagggcacaagtagtttgctgaatcaagcctggaggttggcctcgaagactgcccaaggtttgaacacaaagagtaatcagcagttgaagaggccacagagaaggcatagatttaaaattagggaatacatgggtcacattcatgaaataatgaaggcaagggtttggactgaaacatagtagaaaataaagtaagagatgtagaatgagtttaggttttagaaattcttcctagccaggcttagagttactatatgaaacaggcagggaccgtgatggtggatgaatgacatttttaattaaattaatttggcaacattgcagaggtgagactaggaaaagagtctagaatcattaggcttattgcattgactcatgtctgtggtgctgtgggcctgaactctgcctgtccataatcctggtgggaattgagagggccccattcaatttagaaagggactagccacaagagtgaggagaatttgaacgttggaaattatttcacaaaatgatatcttgttcctcagccagtcccgtccctagtaaatcatcttgggtgtgtgttattgttgttgtcattcttaagctacttaccatttctttatcccttgtaaatgatggtctccgtaacccctccccatctgtacttcatcatttttccttttaatcttaatctaaaatgtgctcagcaggtactctctgattgttaattggaacgtccactggtgaagcttgcacagtggcattgcaattgcttccctgtatctttttaattttttcacccccttgttcgcatctgaaacagaaaatgtctgttcaaccccttgatcccagcaattagctaagtggtaggcagctggttatctgggggctggctcaaacactgaatcatctctgttcaggtctgaatgggaagcttctcgagcagcaacacctataattagtgtgtagttgcaagaaaggttttttgggagtggcaggtctcaaagcggtgttcccagataagcagcatccccattatctgggaaactgtaagaaatgcaaaatctagggcccccaccccaaacctactaaatcagaaactggggatggagcccagcaagattttaacaagccctccaactgcatgccaaagtttgagaaccactaccctggagaagtagcttcacagggttcggcagccagactcagggaggtgggaaaacagactgcaggaaacccagggaagtttagaggctgtgaggagcgggtgatccttccctcttggagatgaggaagatgcccagaggaacaactgctagcagtgagattttgtgctgagagctcctgccctctgaaaaaaaacctgggtagccctcacttgccttgtgctctgaaaagataagttcttaagtcagtctttgggaaggtctgttggatcatcctgctcaagagtctttttgaaaattctatgactaagtagatgaggaaagagaaacatttcccactttgggtgagtctcattttcctctgtagaggcatctaaatgctgaggatgtacttacttgatggccaagaggaaataggagtttgtatttcaacctctaccctacaactgaacatttactccataagaatcaactctttactgaggctcttttgaaggtgctcagtcatggagtcctggtcaacatgctaaatttgcctgtggttttagtatcacacttgtttcatggattatgggagcctagaaatgaatagtctgccacttaccaagtatcttatattctctaattattaagaggatataagttaagttagttaacccgtagcaatttagggtaagtcagttttctactaccagaggcagaactagtgttatttcagttcataaaactccacttttttttttttcctgttggcaacatatgcccatgtaaatccttctgaggtggatatgcctcatcagactggaaatctaagtctgtgtgtgatccagagtcactttcctttgtagtttttttttctttaaagcacaatttctttgctagcttttgaagtttctgtgtatctagacaaggaaactcctcctactttacacaagaagggagaggtgtttgtatttcattctccatcctataatgtgcattaatcattaagatgaagtctctttgggaggaaaataaatcctggttgatatggccaactcttttgttgttgaaatatgtattctttttttaaaggatcattgaacttctccatgggttgtttccatttggggaatgaaataatggggatttggaagctccactctgtggtctctgattgtgcgagtccgtaaactacaggcactcagaggacttatctcagaggggatctgataaacagttctgttgccacttgaaaaaaatcaggcaggacatttctcctggggctgtagtggcaagcaggaaatagctaaaagggatagaaagtacattgcccgatcactcatcctatatgggtcttttgtcccagagtttcctgcttctctgcctgccccctgccccctcatattattgaggtatgctcatattacctgccagctccagccagaggaaaagccacccgcgccagcggcatcatttacttcctttagtatttcagctccaagtctagtacgcaaggaatgataatgaaacatgatgaaatcggttctaaattttttgaaaggattagagaaaaggaaaaggtcttgtatggcttcaacatggtttcctgtaaaccaggggtgttgttaaggtgcgtttttcaacacccatgtcctctagcttcaagccctctcactgtggccattgaacataagcattatgaggagggatgacagaaaggaccaggaaggtaagaaacagtggagaagtcactgcagccaattccttatgctcttctcaatacctgtttccatttatgttgaatccaagtatcctctgtggcattcagctcacatctctcccccaactattccattttctaccacagcctagcaaatacttttccaattagctgtatttctaggttaccaccaaattaaccacagaggccacgggattaataggagctagggaactcatgatggccccaaatatgccaccagtaactccaccaataacgactgtgagggcaactgtaaggttttggccttggtgaaacaatagtcagttttccatgatagtcttggaaaccaagccctttttttctctccccttgactgcgtatacatcaatcttgatgactgtgagtttataatgcacagctatgtgagtccccgctggcacaagtgagcacctgagtacagtagttacctacagatctccccatccttgcttgcttattctctgacacacacacacacacacacacacacacacacacacacacatttactctttagtaacgtatcctgcagagatgcattgtctcttcaaccctggagtctataggatttctggtcaacctagttcctgtacatttttcactgcaactagagtggctgggaactctgacacccatggacctttgggtcttgtttttgaaacaaaaacaagcacccccatggcctgagaattgcagaagtatcaccgattcactgtagcctggattttccttttttcatcgaaattagtacctgtgtaggagagcaggcctagagccatggcaggctgtgatatttggcttccttgcttgtgtctcctttcagcattggactaaccaaattccatgctgtctttctacccaattccctaccttagtgaaaacctggcaattgtcgtttttttttgttttttgtttttttttgaactgtttttcagtgttgttttttgttcagtccacctagtttgtgaatgcaaataaaggttactcttaatgcttgtctggagatttttccacgtgatttgggagatgatatagggcatgtttgacttgtagcagagatgaagaatggataaatccagtgcatggaacatgatcggagattcccacagactaacttaccctgcctctaagtgggccccgagttcctctactgcacagattcctgcctgttgaacagccaagcgttgtccttacagaagtgcaactatactaactggtattgcacacagtgatttccaaagtggcactactaggaaatccttcatcttccatttctcaagctggccctctcctggagggaggaggtctgtcgcttccctttagctaaagtgttttgcttctcttggtattctgtctcctttccctcacctcacttcaccttcacgttcctggcctgggtgttactatttacctactgatcacagaatactatgtgaatttccattcacagctttgagtgtttatgaggctttcctacttcccacccagcccaaaccttgggactttccacacactgatcctctgatcagtttgacacaggaaagcacacagaagtcttgtaccagtttgtatagtagtacccttttgaactggcgactcttgaagtagagtgtgctaggggtttgcattggctgctcgacacacacaccaagtcaattagcatgcatgccaaaaaaaaaaaaaattaacccttagagtactgcttcaaccttttggtttaatggtctgaatttgactggtcggacaatgcttctttccccagatccgagtcctgcacagaaagtctgtgcttaatctagccagaacctcacccaggatcctctcctctctagctttcttgagatgctcctgggtcctgaatttattaatcaactaatggtttttaaaaggtccaaaacacaaccactgtgtttaattgaaaacaggccccactgccaatgcgttggagggcatgaggaactgtgttttagctttagtatgtgtcctctcaaagaaagaaagaagttctttaagggttaatatgaaattaaggaatttggaggcctctcctgcttgtccttcctccagggtatctgcatgatcctctttagattcttagttcaactgctgaatgatgataaaaaatgatagtatataataatttcgaaaacaataaataaaagaacagtagttcctgaatggttgaatggaaagaccccttggcaatgcttgcttgatgatcccaggaggcagaaagaccaaatgttttcttttatgaatattcatttcatcgtctaccctaagcactaccacttctcagcatcgtgggagacaggatgatactacctgtcatttacctcttgctttttcttcttcctgtctaatagcccaatagaatcctgccagaatttctacaaagatttcacattacagatcgacatggctttcaacgtgttcttccttctctacttcggcttgcgggtaagtttgtgcaacattgttcagtatcacaatggggtgtttcagtctgggacccagggatcatccccctcagcctctgctctcgcagtcaagatatttccaggagaaacagcgcacccgcattctgattttcagtctgagagagagccctctccttagctaagcattttctggaattcacatcagttttgtttcaagggggagaaatagggattgaagaaaaatgatgatgtatccaccggtggattgtttctcatctctctattcacataatgccctgttcccttaaaaattaaatagaaataggctgagtgtggtggctcacgcctgtaatcccagctttgggaggctgaggcgggtgaatcacctgaggtcaggagttcgagaccagcctgaccaacctggtgaaatcccatctctactaaaaatacaaaagttagccaggcgtggcggcgggcatctgtaatcccagctactcaggaggctgagacaggagaattgcttgaacctgggaggcagaggttgcagtgagctgaaatcacgccactgcactccagcctgggcaacagagtaagactccatctcaaaaaaataaaacaaaacaaaagtaaatagaaataaacctcttcagctcttaaaattacgtttagcagtgttcacttagctgagccctgagagagcagttgtgagtatgaatgaaaggaaggtgaggagagtagatggatggaattttgtgtgtgtgtgtgtgtgtgtgtgtgtgaatgcgtacatatgtgctttatttatagttatatttacatgaatgagtctaatacaagtaaaatcacccaatcttccctatgaagctgttgggaaccacagaaaaatacactgcctgatctttctcttaagactagcatagcatatagttagtctatatagggctctctatggggcactagaaaacgtgtgtgtccaatcataaaagcatgtgctttgtgtagatatgagaaggacataatgtctccctccagaccttaaaaattaaatagaaataggccgagtgcagtgactcatgcctgtaatcccagcactttgggaggctgaggcgagtggatcacctgatgtcaggagctcgagaccagcctggccaacatggtgaaatcccatctttactaaaaatacaaaaattagccgggcgtggtggccctatgaaaactcaaaacttaccctttgacaaaagagtgtacattggatgccagcaccatgcttctcatgttttttctctttcttatttcttctttcccccagtttattgcagccaacgataaattgtggttctggctggaagtgaactctgtagtggatttcttcacggtgccccccgtgtttgtgtctgtgtacttaaacagaagttggcttggtaagtcagcctctctttccttctccttcctggttcctgagtcatggctgaaggacagaatttgcagtggatgagggggctgtctccctacaaacaatgttgtatgtattaatgtgaacaacgggctcttggagttttagaagttgatggtggcagctctctttggagcactagccccaaagggtttgcacagtttgcgcttcaggcagtgcagttttatcattgtcaaagcctagtggtcatcactgtcacagccagggcctttatgttcatggttctgtcacttttcattcaggaacttagagtcaggactggattaagaagcccatgggggtaaggccaactttccgagtggctggctcaggtaccccagaggcctgcctgccaaagttagctttggtctgcttccaaaaagtgggttctgcatggtctatttataggtacaaggttctttgtagggcagggagagatgaagcttcttgagtcatctctcaccttacaggagactgaggtccctttctgtgttaaggggagagtgctgctgggctgtactgtacagggcacctcctggaccaggactagaacactttagtggagaaagtaacttgaccagaggatagtcatggaagcccagggcttagagagacagcttcaagtttctcattgctgcgttgatttcattttttccctgaattcagagtattcctgctgtcatggggtctactagggaagaaggcaggccgaaacagaacctggaggactatttgtgggttccttctgtccttatttttaggatttttggcttaattatttaaaaagtaatatgcatgcattgtaatcaatgaaaacaaagatgtgtgaagagagcattcatcatcttttccccttgcctccatcactgcctcctcctttagacacccacggttcccaggccttcacatgtgcacacatgatagtgttttagagatggtggtgtttgtataagaaattgtttcaaataattacattgcaccacaatttggcttcctaactaatcatgatggacattccgtcagctctgtgataactcattttgtaagagttgcataaaattccataatttgtttgtatcgcagtatattcagccataaccctaatgatagaccacctgaatgttttccttttccttttattgctgctagaaacaatggtttaataaacactgttattcatatatttgtataattctaattctatcaatagttccaggttcctggaagaggaactgctggttcaaagaatatgtgtattttcttttgtgcagacattgatggataacttaaaaaatgttgtgtcaagataggcttccgctagcaatccattttgatgccattgctagcactgggaatttattatatacctagtgtcaagtatttttttaaaaaataagcatcttcttaatatagtatgtgtggtaatctctatattatatgcacatacacgtgtgcatgcatatatatatatatgtatgtgtccatatcctaaaaagatttcttttgctacagttttctcattagaattatattctcttgctctaaggaaaagtttttgttttggacctgagatatgcttggttagactggattttttgcttatcgtatcctgattcctccttattttctccgtatcgtatcctgattcctccttattttctccttatcctgatgaggctagtagagtcacacacaaatctgagaagtgtcctcagtgtaacttacgtggccctgggtgccagcagtcccagctgctgtagcttcactgctaactggctttgtgacctgggagctcaattttctttacctagcctgttgtttttcatctgtaagataaagatttggctagatgacttcgaagaatcttttagctcagaaagtctttaaggttcttgggtcattaatgggaaatttgggatctaggtcattggggtggacagggaagctagtagaattctatcagcagcacccctgagtcaaaattatggatgagttgttaacagggactccttttaaaacatcttgttgctaagagttcaaacacatacccatgcacacacagggaaatcgatggggaaggggagaggtgggatctgccttcttcactgagctgtgcttaattaccctgtgcactcgaacaaccactttgcttttctggatcctcagttttctcatctgaagaatgggggtttaaatgaaattaccttctagtcctcacacttcatgaatctgcactttctgccagtgtccattgtctcttggtcccctgtgggcctgggtgatggaagggctccctggtgactgtggtggagacatcctcctctgcagtgagcagaacatgcccccggtaaaagtgtggagcccagcttccttgtggtgagtgacacgttccctgaagcattttagggccaggagttctggtatgctttgaaatccatagccttcctgtggatgatttaattctgatttttggagatatgttgtgatctcataaaaaatctattggcacaaacacagaatgggggtgaaaaaaattgaataggaaataaaagaggtggaaatgaatttctaatgagatacatctttgtatcaactgtggtcgctttccaaaagaaatgtgctctaaatgtgcttccatttgtatattaatatttattgagcatctactatatgtcaggtaccattccagatgattgggaaacaacagtgaagaaatagagtcctatccccctaccctcctatactgcagtgttgggaaagcaggaaacactgaacctaataaggaagtaaatgatacggtatggttaggaagcataagtactattgaaattgaacacatagaacaataaccttttgggatatgaaataataataacaaaaataaaaaaacctctttcctcttgtaggagaaagcacctttaatgaaatgctttaggttctttggtagcgaaatctccttgggtgaaatctaaaactgatctccctgttatggaagagaattcagtacaataatatttcaaggaggttctcatctgacttaatacatgggttattacattgtgaaacaaccattgtaccaatgagcttccagagagaaaatgaacattcccatgagatatgacttataaaggagaagaaataatcccattaaataggggcatttcaggcatggctgcccttctcctggaaagtggaagggtgctgccttttctggctgaggtttgggataagatgcaggaaaccgaagtctatccccattctcctgcacaaactttcctggccctgctgagggtacaggactgtgcggtagctggctctgtgggagataaaaaccagagtgaatgcagggtccctgcccttacctgtcccagaacgctccccacaccgtgtttagttttcaattgtcggcatatgattgcgtgttgtatagtacagaatatattcattgtgcagatcatcctagtgcatgtaacggtgtactcatagagacactactatgtagtcagctcctactgtgtgatgggcactctggaaagcccctcacagacacggactcacttaatcctcagagcaaacctatgaggcaggacttgtcatttccccatttacagatgaagaaactgaggctaagagagattatcttgtccaaggtcacatctcctgggagtggtgggaggggtgcattccccagtatgtggtctgactttatgtccacactcttcctctgctcttctttctgtgtccttaccccttgaatgatttggagttgtgaggcctgggttgggaatgacagggctagttttgctgtgttgtgttggcatccctccatcggtgcttactcataaagggcttcactccaggcaggaagagagggaagagatcttatttaagactccgtgttctcctggctcctctttccccctcctccttgcccacctccagtttctagaaatgccaggaggaccagaagaatgcagagctagcctggtgtctcccgagtcctagtgcccctcagcagcttggagatccgacctgctccatctgggacagagagactggggcttaagaacaccccggatattggcgcagagtagattaaagctcagctctgagctccaccaactcagtccacatcttggctaaactgtttgctgatgggtcgctcagcatgagcattttatctgcctcaggctcagttatctcacctgtacaatgggctaattacagcacccacctcatagggattcaccgaggtaatgtgagtagcacagcacgtacttcatacgagcttaatgaacagaagccaggattacctcggtctctctttctaacctacccatcatattttaaagcaccgcaggagaaaacaaaccagaacagaataaaaaataaggcagcggatgtgaggacagtcatgtcggcaagcagcaagacgctgcttattttaattcctgtccccacccaccaacttattcattttgtttcccttacaaatccaaacctcactaaaataaatgcaccttgaaatgagagctttatcttattttgagatttgaataacatgctccaaggagaactcatatgtccgtctgtctcattctcttttgggaatgtatccccaaggtaggtcaatgggctgtgctgcctctgtttgtgtgtatgtttttttgtttttgtttttgtgttttggagtttcgcccttgttgcccaggctggagtgcagtggtgcgatattggctcgctgcaacctctgcctcctgggttcaagcgattctcctgcctcagcctccccgatagctcagattacaggcacttgccaccacacccagctaatgtttgtatttttagtagagacgggatcgccatgttggccaggctggtctcaaactcctgacctcaggtgatctacccgcctcagcctcccaaagtgctgggattacaagtgtgagccactgcaccttgcctgtgtgtatgtttttgttgagggtgatcttgtaggatttaaagaagggagtaggaggaaagtaatgatgcactcaccagccagttttctagcccatttttattacctactgtgtgctcagcactgggatgagaggaacacatgccgggccaccctgtatcctactggtactgtgatttccaacaccatcccctgttctttgactgatgaaatcggcatatgataagggaccatggtcattggaaccatgattggaaaactataaacttgattctattgtctgtatcagaactggccttagaccttaaaccttaaaaccttcagtaaactctgctagaaaatagaaaaatgagttaatgcccaatcacagggcagttgcaatgatgtagggtatctgcttataaatatatgcccaaaatagtcctttttttgtgtcagaaggcaataaaaacaggattatataaaaaaagcacaggtgcttaaaaacaacaacaacaaaaggacaaaacattgttcctgtttgagactaaagtttcaatctcattttggaaccaaaataaacacacatgcagtgacagcaggtaacactacccactatataattaagcccgtaattgcaaggtacaggctgtaaaggccatgggagttcagaggagtgagagctcatgtgggtgggagaatgaggataggcttctgtgagaggctggggctcagtggaggctgcaatgatgggctaagacagggagaatgaagcctagtatgtgtggagcatggtgtgtacccacagaagctaataacagcctagagaagaaagtggccttgctactggggaggatgaggcaggaggacccctgagctcaggtgtttgagaccaacctgggcaacatagtaagaccctgctaaagaaaagaaaaaagaaaagaaaagaaaagaaagaaagtcagaaagagagaaagagaaacagagaaagaggaaggaaaagaaaaggaaagaaggaaggaaggaaagaggaaagaaggaaggaaggaaagaaggaagaaagtgaaggaaggaagaaaggaagcaaggaaggaaaggaaggaagaaaggaaggaaggaaaataaaaggaaggaaagaaaagaaagaaggaaggaaagaaggaaggaagaaaggaaagaaggaaggaagaaaggaaggaaggaagaaagagagaggccttgctgagtgccaagcatcagcctcacaaccttgcaaaatggtgtagaagttttctatttccaagcagttctgtgggtgagaagtccaacatgggtctctccagaggctctagggaagattccatgtccttgccttttccagcttctagaggccacctacaccccttggctcatggcccctttctccaccttcacagccagcaactaagggtgcatccccaccttgcatcactctgatcttgcttcctgccatctcttctttgcctccttcttctacttttaaggactcttgtgattacattgggcccacctggatactccaggatactcttcccatctccaggtcagcctatcagcaaccttaatttgcctgctgcgttcatttccttctggcatgtagatgaccatattcacaggtcccaagattaacacagacatctttgagggtcatcgttctgcctaccaaaaggggcatattattattcccattattatttccaaagaggaatctgaggctctgaggggttgagtaacttgccaaagtcagagcccagaagagggtgcgctgggatccgggcccctgttcagatgtgccaaaagctctgcagagccttttggagtcctttgctccaggggtcattcacggccctttggggccatgcttcatgttattttacagcctgttagggaggagaccgttggggagagccttattgaagctcaacaccctcccacacccctcatttgcatggagtgacatttttttttcttttcatgggaacaggtgagttactagacagacttgcctgttgtctgttgttcttacgcaacttactctgaggtttgggtgccccttcctgtgcagctgcagtgactgaggggaacatattaggtctgcataacctccacctagtagccctcttttttaggaatcatgctttattgctttctggagtttacagagaaacccaaatgagaccaaagagttgtggtggtaggccaccattttcctaagggaagcggtggatggggtcagcacaccactcttccttttaatggttaccccacccagggctcagctgaagtctcaagcatctctctgttcctctgcttcaatggagcatctgggcccaaggccacctgcttggctgaagagccccgccccaccttcaggcagggtcaggatgattctgtgaatctctggaccttctgttgactggcctctgcatttggtaagaataatcaagaatgaaagctgtggcctggtttcagtttcctgacatcagtaattttcagtgtttgggatttaaacaaacacaaatagtatggtttggccagagagtggaggcagaccctggttggcatccccatatgcacagccctgcctcctgcctcccctttccctgtacttcctgccccagctccactaggctgctagctgcatcttcttgctgtctctgccctgtgcctggtcatgagtaagttcctgccctgactctgcaggttgtaatccttctccccattaaggcacagctctgactccagctcctgtgtgcagctttcccattctcatccattggaatgaattcctctctgacctttgtattgtgctgttaggattcgtgctataggagcaccatacgcagcctgctttgtactgacaggtaggactgcagcttccatgatagcaatgtggcagggactgtggcccccttgtttttcgctatgtccctagtacctggaacagtgcctgacacatagttcatacttgttgaatgaatgaatgagtgagtcttcttaggatcatgatagtaaggaacagttattgattgcttattaaaagtaggcactatgcccagcatctcacagtcattctctgagttaatattcacaataactcgatgagtaaatattcatagcccaagtttacagtttgggaaactgaggttcagggtctaagtaagtggcaggtccaagactcaggttagtccaattctggagcccatcttttaaaatgattagaccagtggttctcaaagtgtggttcctggatcagcagcatcagcgttactggggacttgttacacatgagggttcttagagctcaaccgagacccagggatcagaaaccgcgagttggagccagcagtctgtgttttaacaagcactcctggtgatctccagttttggagccaccgtactgacttatgctgggatggttctcgaatttttattagaatcccccagagtgcttttaaaactcttcatgttcaggccaagcctttaaaccattaacctaagaatctctgggtggagggtgtgacctaggctcagcttcttttaatgtttctcagttgtgtctgaagtgcagtcaggatgagaaccacttgtatgcatctcctaactttctaaactttactgtgcatgagaagcaccaggagatcttgttagaatgcagtttctgatttaggaagcctatgctaacgtcagagatctacatttccaccagctctcaggtgtagtgattctcctgctctgtggaccacactttaaatagccaggcttaccaatccacttaaaaatggccaaaaccacaattacttttgcaccaaactaatacactgtgctgtccagtatggtagctcctagccacatttgcctatttaaaagctcagttcctccatcctaccagctgtttttcaggtactcaagagccccatgtggctcattggctgcggagctggacagcacagatgtggaacattccatcatcatagacagttctgtgggaccacgctgctctagaatgagtctgtgacagcacacaccatggctttttactttttgtatgcccaggacactcttgcacatagtggaagcttagcaaatgttttttgaagtgattttgagtgaatggaccaatggtaaaaattctatatctaaaagaaataaataactttcctgaagaaatgctagagaaatcatgaatacactgttaaaaggaaccctctaccaccctacccaaattaaattaaatatacttaaggactcagtaggccaaaaagcacaagagacactggaccatgctccagctccaggacacactactctgctgctactgaaatggcattttgggctctgaaaggaaaggtctctggtgccccctagaggctggtcctgcaatttgctggatttgtgagcaattaagtagcaaggggagaggggaagggggccaatttcatcatgctcagatgggcagttcgtggttagcagtggtggagataggctcactttgaactcctataagctatttgacatctgataacttgactcaaccgctatgaccaaaagcacccctcccccaagggagttgcttctcagtgacagtgcccgaagcctggaaggaagggcccctgagtgcccccagaggtcacccactccatgttccaggcagctgactttcaacttggacatctagattccctgaagcccagagccttctaagtaaactgctgtctgtagtctgtgggtttctttagaataagaatagtgaaataaagaaaagaaaaagtatgatttccctttttgggccaggtgtccttaggagagtgggggttggggggtttgagagaaagagaaatccaaaagaaaagtgcttccataactagaataaagttagatgtgttcatattacacatattacatatatgtgtatatatatgtatgtatgtgtatgtacatacagtatataattgtctcaagtgctcttccaaacagtactatgaaataggtgtcatttgggggcccatattacagatggggaaactgaggcttcagaaggttaaataaattgctgagagtcacctagtgagtaaatggtagagctcagctttgatctcaggcaatctacctccaaagtccatgttacttgatatgatactatgctgtctctcaagctacaagttaacacatttttaataacttaccagcctccaaactacttttttcccccatgttcaccagtcccctcttctgagcttcttgacccattctatacaagtagccaaataaataaaaacaatccatgtttttaccattagtccatgttgaaatagtatcatgctagatgttatgggctgctatggtctgaatgtttgtatctgccccaaatgtatgtgttgaaatgaaatcccaatgccgtcgtgttggagatggggcctctgggagatgattagatcatgagggtggagccctcaggaatggtattggtgcccttatgaaagaagcccttgggaggctgtttgtccctcccaccatgcagggaaacaagaaagtgccatctatggagcagagaaaaaaccctccccagatgctgaatctgttgtcgccttgatctgggacattccggcctttagaactgtgagcaatcaattgctgttgtttataaattacccagtctaaggtattttgttagcgcatatagactgacatggggctctactcttggcttgagcttttttttttttgtttttttttgagaaagaattcaatggcaacatacaccttatgaatagcattgcaactgaattgctctagtgtgacaagaaaaatgaactcattattaagttctgtccctatgattgggctctgaagaaggcagcccagccaagtggaatactaaaaatttggatgtatttcagggagctcattgctgttccggtcgctgctatagctaaaactgcttctagagaaattactcctctccaagagatttccaattgtgttcccttgatattgctttgtcagggacacgctttaaataagatgccctccgtaagtagagattctaaatcctcattgatttgcatggctctgttatatgccaaattggaaataccatcctaaaatgaatgtcttcaaggaacgaattcagcagtaggtttgcatggatgccaaaacctctccagatggctgtacttcatctggggtattattggaacagcctcctcagcaacctaaatctctaggactggacgtatatttaccttcacatcatcttcaaaaaatagatgccttgattcttttccatgagaccagggccataatggattgacctggctagcagatcagatagggagaaaatgaacacctgaaaccagctcagggattcgactgcattattcagctgaacacctactgtgtgcaaatccctaggtgctaggagtgacccaaagatggggaaaacatagatcttgcctctataagatgttaataacttaattggagtgtcctctagaaagaacagtaagtttataggaatttagaggaggaacagatggaggaaagttggccatcccagcccaaagaagatttcaggtatctaaaatataaacatgtttctcctagagcaggactactcgaggtgcggtctgcaagccagcacatggcctgggagcttaatagaaataaaaatgttggagttcaaccctaaacctggagaatctctgaaaggtagggctgaggaatctgttttaacaaattctcctggtgattcttctatgggctaaatgatcttggcagtatgttagaatcacccaggaactctgacacgtcctcctggccagactgtatttctaaccaagcatatgagaattggggatgaactcagtcaccagaatgttttcaagttctctgaataatttcacttgtgcagccactgttgagaggcctggcacagtggtggttcttaaaccagaggaacatacctgaatacctgagaaacttcaacacacacacacacacacacacacacacacacacacacacacgcacacacacacacgcacacgtactttccgaaatctattctgtgaggctctttgggtcgtggtaaggacaattgctttggaacaagcacactatgtattctagatagaccagtggttctcaaactttgagtgcaccagagtcacctagaggtctggttaaattacagatttggggtgttccatccccagagtttcagattcagtacacctgggatggggcctgaggatctgcatggctaacacattcccaagtgatgctgctgctgctgatctgggggccacactttgagatctgctggtccagcccacggtgaggctgaacttgaattctagttgtagctgctatgcaagtttccaggattctggtattagagtaaaccttgctattttgtgctcctaaatatcagtattcttattaatgtaatcctttatttcatatgtttttgagattaaaatctgagtcatttacatcttgagatatactcatcctatgatattccatattacaatttcaacttgaacagcagaacccttttcccatagctcttggatcttccacttgtaatccccttctaaggtattccaagtccttggttactagtaagaatgagcacctttgcttgactttattagtcactagtattttgtctagagccaatttggttgatatcgcttcctaaactctctgaaattaggatagggtcaactcattcaggaaaatagatacagggtgtgttggagattagggaaggagaggggcggagggaggtcccaggccaaatttctaactcatccctagagtctcacctccgatgttctcccagggatggagcctcacctctgaccttctcccagggatggagcctcacctctgaccttctcccagggatggagcctcacctctgaccttctcccagggatggagcctcacctccgaccttctcccagggatggagcctcacctccaaccttctcccagggatacagtatctcagcccgctcctcgagggaagggctctcttagggtccagcctctctccaatagcagggtgacttatttgaacaaatcttctttcccagtcatctcacttgcagacactgagatgcccaggcctgggcccaagcctgctcatgagagtaagaacagatgataggtggtgagcagagctccatttttcttttttttaaatttatttttattattattttttagattgggtcttgcattgttgcccaggctggagtgcagtggcacaatcttggctcactgcaacctccgcctcctgggttcaagtgattctcctgcctcagcctcccaagtagctgggattacaggtgcccaccaccacgcccagctaatttttgtatttttagtagagatggggtttcaccatgttggacaggctggtcttgaacacctgacctcaagtgatctgcccacctcggtctcccaaagtactgggatacaggtgtgagccactgtgcctggcccatttttcataagacacactatatcactcgaaataaatgccaaacactagtgtggtgacactttgctcccatatcacaatcactaaattcgacttacccctttaaggccaggtaggaatttagcaacccagctcataaagggtaaaattagcttattatttcctgagtggattgcaaacctcactggccagattgggagcacagcagatacttcctttttgtaaaaacttggctgagtgtggtggctcactcctgtaatcccagcactttgagagcccaaggcaagaggatcgtttgaggccagcctaggcaacacagtgagaccctgtctctacaaaaatttttttaaaaaattagcccggcatggtggcacatacctgtggtcccagctactcaggaggctgaggtgggaggattgcttgagccttggaggttgaagctacagtgagctgtggttgtgctactgtactccagcctgggcaatacagtgaaatcccatcttaaaaaaaaaataaaaataaaaaattaaattaaattaaacaaacaaaaaactcagtctcatggtcttccttctttatattctcacctagccttcttctccagccctgtttgcatttttgtgaatttctcccattttcactctagccagcctacttaccaaccactcctacccaatctcagatatgttccatcgccatggttttggtagtttcttgtctagcagctgctttcttgtcttctctgcttacctgcactcaaccagttattatcctgttacttgcctcttccaaaaccactatagtctgagccactcttttgatcatgggtgatcttctgatgtggttgtgtttttataagtaacatgtacctgtcctgactcatcaactagatcaggagttagccactctggcctactgcctgtttttgtaaataaagttttcttggaacatagccatgttcattcgttcacatattgtttatggcaatgacatgaagaagataggacccaaaaaagccttaaaaaattattatctttctttttagagaaagtttgctgatccctggtctagatttgcagctatgttatatattcttttatattcctctaaatgtctggcactatgttttgcatacaatagctactaatcaattttgatgacctgaacatgaatttttctctgaaatccttataaatgtaataggaataaaataagttatttttgctcttgttattgttattattattatagctgctatgtacagtcctgctacataatgtttctgtcagcaacaattcccatatgcaatggtggtcccataagcttataatatgtatttttactgtatcttttatatgtttagatgcacaaaacttaccattgtgttacagttgcttgcagtattcagtacagtaatgctgtacaaatttgtagcttaggagcaataggctataccatatagcctaggtgtgtaggaggctatacaatctaggtttgtctaagtgtactttatgatgtttgctcaatgacaaaattgcctaatgacacatccctgtcattaagcaatgcatgactatattttgtggcaggtattggacaaagctctttaccggcctatctcatttaatcctaacacacaggtagaggaacttggaacttggagaggtgacctgtgtgacctgtcttacttgctgtatgacttcagcaagtgatacagcaagaattcgaactcacatctttgtgatctcagcgcctgagcttttaattactactatatacccacggtttagtagtaactcatacatgtgatgagagacagaaatgtttaaaagccctaccaatgagataaatcatgtaaagaaaactggcctatgttataaataggctaggagcaagatgaagcaagtgaccctgaaagcgagggcctcagctgggtgcagcagctcatgcctgtaatcccagcaatttgggaagctgaggtgggaggatcgcttgagtcctggagtttgagaccagcctgggcaacatggtgagaccccatctctacaaaaaatacaaaaattagccagacatgatgctgcatgtttgaagttcctgctatttgggggctgaggtggaaggattgctcgaggaagtcgaggctgcagtgagacaagatcatgccattgcactccagcctggggacagagtcagcccctgtctcaaaattaaaaaaaaaaaagaaagaaagaaaaagaaaatgagcgtgcctttcaattttgttccctggatgcatcactgtcttaccctagtctctgccctggttaagaaacttcataaatattgccggtttcattattatcatcatctttattattatcatcattcactcaacaaaccttaaaacaagtgtaatgtgccagctgttgtcctaggcttggagtttaaactaagatattttagccctactataggaaagatgaatctataaaccccagattgcaaacacaaatgcttacagggacaagaagataacaaatgggtgaagcaggccaggtggaggctgtctctagcaggagagtgaatgtctctcttcaaaggaaggctgttccatgaaaaagaatgaaaccctgtcatttgtggcaccgtggatggaactggaggtcgttgtgttaagtgaaataatccaagcacagaaagacaaatattgcgtgttctcattcacatgtgggagctaaaaaaaaggggatctcatgaagatagagagtagattggtagttatctgaggcagggaagggtaggaaggaggggaggatgaagagaggttgattaatgggaataaatatacacttagatagaagaaataagacttggtgtttgatagatcagtagggtgaccagttaacattagggtgacaagttaacatgaatcaattgtacatttcaaaatagctacaaaagaataatttcaatgttcctagcatgtagaaaagataaatattttaaggtgatggatgtcccagttaccctagtttgacaatatggatgtatcaaattatcacatagacactgaaaatacatccatctactatgtattaattttaaaaagaggctattgatcaacctttggcaaggtcttgctgtattgacagcttctcaatgtccactagcagttacctccttctccccttcatctttcctacattaaggcaaaaatacagtattcagttaaaactcctcctcccctccttcttttcttcttcctcttcatcctcttcctccttctcctctccctctccctccttctccttttcttttccctcctccatgtccttcccctcctcttcctctctttcttcttccttcccttcctcttcctctgaatcaatcatttttggccatagcgacttgccctttgcaaactagtatgtgttgcagtattatgatttctctgcttgagacaggaacctctggtgttttggaggaaatttcatcttgggctgctccccttcttaccacatctgttgcccagtatccaccacaaagcctgtaacttagcatctgcctataacaccaaacaggttgcatcagataaacaaaaattcttactgtggtaggtgaatattttagcaaacgtaaaatactataactcgaatttacaaactgggtcagaagtgctttctcatgttttggtgtctggagcaacgtgcacatggtcagaggacttcttatttcaattttcttgtttgtttatatttattttatgaaataaatagcctcccttccattagtacaagtacttctggtttgttagagacgaagggccccagctccactgggaacaaaggggacctataggaaacacaagtgtcgccagcttttccatgcactgacctgccctaatgtgtatcctcctcccatagcccgcagagactccccaacctcactttagctcaactgcattttccccagactgttctgaaaaatgtgttgtgacgtgctgccacctagtgaaggaaagtaggaatggacattatagtggctgtcgccctcagaatcctctttgaagcctggtttagttaacctctgccgaaataaggtcctacgtttttaactttcagaaaataactcttataagactcccaaagggtccaaagactatttagtgaagactgaagaagacaaatgtcaagtgaatagctaagagtttgaaaagtaggtatacgtgttcgggctaagtataaatggaaaacaactccccgcagaaaaccattctaattggacttgcagggcaggttaagaggaggaagtcagcccgactccagagtacagacattacctgttttcactaaaataaaggactgtcttcaattgtttgcattatcattttatctccgtagaatattttccttcggtcttttgactgaattggttttgaatttaaaagaaatattgaaatgatctgtcactttactttttgcctatcaagctgtcagcttcaaaaaatgaacaaatgtatggattctgaatagatatgtttctcagacctaaaaagaaagaaaatgtgttaataaacttgcgtctagtcatcatatgtgtacttcaatgtgtcagaactgatttatgaaccagaagtactgtgtttaagtgaggacttctctgcattcatattttaagtattattatttcattctttcctcttggggggcaagttagtataatattaccattgactaccgttgggtgggtcccaaaggtcatttctgtggaggataatagagcttttcatatgagacactttcagctgcctagcagaggcagcacactatgacaagtggccaaaaaaaagtagtgaatatttttatcgtgagttttcatggcatgaatcaactcattcttcagaagtctgtatttttttctttctattatggcatgtctgtcatttcctttgactctctggctggtcttcatctcagcaaagtggaaaaaacatattttagatgggaaaaaatgggaagaaactgaaagagggaaaatatccctaatacaaggagaaacacaactctagattccctattgccatatggaacatttaggatttcccaggaggaaacacgttcaaccagttgcttctgttacctccggactaagagggatcctgatagtagctgtggctggtgaaggaacacctctattatctggctctgggtgctgcagaaccaggcagttaacaggacaagaaaaccaaatgatccatgggtgcaaatgtgcttttgccaaagccacttccctggggtctagatagcgaagagaaatggtggcttctagaggaggaagagctaggaagtaatcctggagtccagttgtcttttcttaaagatcatgtttcaggattccaaaaaaaaaaaagaaagatcaatggcatgtaggagggtgggggacaaagagggtgaattatgagtttgtgtctgtgttttaaaatagccacctgccttgaaactgccatttagaaatgtgcatggaaggagaatcttcctgattcttagctctaatttatggccaatttatgaagtcaaggtcatctctcttcctgctggtgtgtgttcaacctggcctccctttatgccaaagaccttgagcagaccttggctaaaacccccaggtatactcccattcactgtcagcagtgatccgtggaatggattggggctggccgccttgccttgggcagagttcatgtgtcactcaggaagatgcatcaggctgctgagtcagagggagtctgccttatgtccacagagaggagtgaatcagaaagccagatgagtccagctctcaggacatgacaaattgcagaatgccgagctgggaggcttgagtacatcatatccttcttattctactgatgagaaaactggggcctggggatgcccaggaatttgcttacatttcttctcctaatgaattaattctttcatttgttcaacagtgatgccctgagtgtctcccgtgtgtcaggctttgttctaggtgctggggttagaaagaggaagagtgtcacatgaggagaagacacatgtcacaggtcattctaaaagggaaacccaactgagaatgaagagtgtctcagggcagaaaaaggaaggagcaaagacatccaccttggcactagacaatttgggtcctgatttgacagtctttagtaattagcataaccatcagtacatcatggaagcttaccccatgtaccatttcttagctctcctcactgttgtgattgcaaaggtgcttggaaggttacttgatgagcctctttctgctgctccagacccagactgtgagttccatcaaggcagggatctttctcagctctctgttttatccccagaatgggacagagcactgcacgcatgggagatactcagtaaatagccactgagtgaacaatggaatgaatgacaaatgataagggttcccaagttccattctatagaataagggtcagcaaaattcttccataaagggcctgatagtcaatgtttttggcttcaggggctgtatgatctccaccaccaccattcaactctgcctctgtggcatgaaagcagccataggcaataggtaaaagagtggacatagctgtgtcccaataaaattgtattcgggacactgaaatttgaatttcatacaattttcatattccataaaatattctaatttttttagctgttttaaaatgtagggggaaaacatttttagctggtgtcctgtgcaagaactggtggtggccagatttgtctcacaggctgtagtttaccaacccctgctataggaggaagattaatagggtaaagattttatgaggtttttaattgattcatttatccatatgtttgagcatttacttactctatgtcaggctctgtagcagacactggacatacaaacagaaatattagtcaccaatatcaagatgaaatcattatccttgatgggtcagatcttccgaggatgagtcacgaccgtgtaggaaatatgaaccccgcagtctgtttaattgatgtatgctatgcactctaaaattaattggagatttctagataaaactttccaaatgtcacaagtatccttccagcatttcatatttacagactggaaaatcaatggagatggaatcattctcccactgtctctaagttaatttgcctgtctaatgctttaacactttctgctagttctgtctcattctttacccattggagagtaccagtgggttttcagataacttccttaaagaccagaaagaaagatttaaaaaaaattccagctccttccttttggctcgggtcttccaggtctttatcttgatgaaaactggaggcaaagatgttatctctggattgtagtcagagaacaacaaaaacccccatcttttctttcccaggaaaatattaatcaaaatagaaataaggtgagattagaaccttagaaggttttgcataatacttttcttgtttgactgtttctggcctgtcttaatccaataatctattaaactctagctagtactttctttcttcatccccagcaaatttgcaatcctccagaatccttttgggaattccaaggcaaacggccttaaacaagaacataattgtctgagagattttgtttgcttatcggaactgtttggtccacagcattatctgcatgggggcataattcccttagctgcagtcagttttacaggtctttgctcataggattacagttcttttacataaaaggatgcttggaatgggggccaccaagagtgccaatatttagtatctttaactgagctcaaagtaataactacttaactagaatcagtgtgcttcttgatatctaggaaaaaaaggcaaaggaaggaaagaacaggatttggggatgtaatttgagattaataaatgattcactcaatagatacatatggatcatagcactctgcttgttgtgcatggtatactgtgaaatgtaagacacaatttcagcctagagtagcttaatctagttatagatatgggaattccaaataccttttctacaacaagagttcaaagtctttcataagtcaatataacaaaagatgaataaatagttaaataatactacagaagagtaaacatgagaagacatgcatttaaatgtatgcagagcacttattgctttggatagaattcacatgttatccatgcgttgactacaagatacatgcacatctctaaacacactcataactgaattcagcttaataggatagtaattgaatgatggaacctagtgtgcctgacttttctcagatgaaatatctggctggtgcaatgcagtaactactattaaaactccatcaggcatggtggctcacacctgtaatctcagcagcttgggaggccagggcaggaagattgcttgagcccaggggttgaagaccagcttgggcaacatagtgagaccccatccctacaaaaaaaaaaagtagttgggcgtggtggcttatgcctgtagtcctaactacttgggaagctgaggcaggaggatcgcttgaggcaaagaggttgaggctgctcagagccataatcatgccgctgtaccccagcctgggtgacaaacacagagaccctgtctcttaaacaaaactcactaggatataccagtgagtccatatgaagaatcctacccatccttctcaccttggcctgaatgaatgagtacaagtgtcagtaaaacagctgttatttatttccttatcccacatctgtccttgaaggctgtcatgtggtcaaggaccatggagccgacagacaatgtttctatcaacaggcagttcaaaccaagcctgtggctgaccatattgagtggatgaaagagccttggagggactgggccttttagaaaaataggctcgtaagtcaagagcatggtgtcagctgtctgtgtgtatttcatggtgagagtgaaagcagatctaaattatgagttgttgagtcacctgcatgaatcaattcaattcttaatttgaaaggaagctcagtgccaagggaacataacatatggaaggagtggcctcaatgactaacaaaaccagggcctattagggttgcctgagtttacttaggtgcatttataagacatgacatttccacagctgttcaactatgtgaaaaccttttgtaagcattactgtatttgataaactctgtgagatggatgttattgttatctctgaattggcagatatgggcaaggatgttccaagaggtctgcagtgtcacacaagtagtaaatagcatagcctgggctagacttagaggtcttttaaccagtcacattccccctcagcagtgagaactatggtctgcccctgctccctcagtgcacgccaattagttaggcctgtattcagatgggatgagttatgttctgattaggaaccacatgtagtatatgctataagttaaaagtaggcagatgtgcctgtagccatagggacttgctgggggagctggacttgagttgagtcttaaaacatggaaaagccttaactaagtggagtggagggccaagagcattccagacaagagaaaaaggtgagcagggggaggaatttgcatccttctttggggagccaggaagtggactggtgtgaatatttcagagtgatcatatagggaggcagctgagggatcctcagtgcgtggttatagtaactggagtggatttactctggggcaggacttactccgttgacacccttggagaagagcaggggaacaggaggagagccttcccagttaccctgttagggaccttctctttgaccgtgtcctgcagatgcacagtagttgggattcatccacctccatccacttatttctttttagctcattttgtttcattcaacagacattcccattaccacattctaggcactgtgtcaagtcttactgaagttactaaaaggaaccctcaatgaatgttttgtgaatttagacatgaatgaatgaacaaaagaaaagggacaagggctggtgagctcattcatgggggagaaggaagtaagtaaagaattccagtgtgttgcattgaatatggcaggagagtgctgggggaacaggcagaaaagagacagcctgacgtgtcccagggaagactttccaaaaggaggtggtgttctggctggttcctggagtctgaagtagaaatttgttagctacaggaggggggaataggcaggtcaaactgagggcaagtgtttgcaaatgaacaaaggcctgaaaattaggggaaaagcaaggatgtaggtgtaacttaagttgaagtggagaagaaggtaaggacagaagaccagggaaaacatttccacctgagactgaacagaaccacctggtccaaggtcacttcgttatgtctttaggcaagccctgggccaaaatggtgtggctctgggaactttgctcactcaaagccctacataagcccatctttcccataagaaggctgagggaacatctatctaagatagatgctagtaatttaacaaaaaaataaaaggcaacgatactatagggaagaaaagaaagaaaggagcggatgatgttacttggctattgttttcctaaaacaaaagcaagaaatgaagcatcttttaagagctggcctagaatgccattctgggggcttaggaaaaaaatcaaaatgtattagagctctctcagacattggatggtttatggcagcatctaaaattgctggtaaaattatgaccttgtaattcacagccgtgtcatatattctctagcacacagtgtaatttatgtaccaagccagttgcttcaaaaaagaatggggaaaaaactcacacaacacaaagtttataaaatgtggttatttttaatggataatgtctttagcctaaacctgtgttgttaggaggaagggtgtgccgttgctcaaggttattaccacagttcttgcagcatggggtgagagtatgaggattacttattacacttacgcattggctggccaggctaccatatccacaactacacagtcctcccttcctccctccctcaaagagagctatcaccttgaactccttcttcccttgaaataaaacctgggcaactaccgaagcttgaccttgactcatgccttaaacctgagcacaaaacttaacctctgctgggaaaccttcctccctatgaaacaaaggggtctcaagacaacttcttagcaagccaaaaatgagatttccactcagcttctcaagttagcctggctttgaccccagttatggagctagagaggggagaggagctgggagcaaactaggaatcatggagggggggactatggggaatatcagattcacacaactctcacttccatgaaaagggggaaggggagagagaggagactcccatggccgagtgatcaggtccagagacctccttgtggtccaggctgcacctgcaccagtctgcttgaccttgagcaacaagctatagtctctgaatcctatcaccctcacctataataaggagatgagctcttgccttcactacctaaaggagttactgtgaggatcaaagggtctattatagcttttaatcttgagccaatgactaggtcattatttttctcttgctctgcctgtatcattttctcctcatggcatacagctcttttgcctcaaagaagattcttgaggatgatgacctgcctcaaacttccttctccctaaaagtgttttcttttgttcagtttcatttctgtctttccacttattcctgattattttccctgagcctcttagagatctgatcacctcattgtataggagctatttacactccttctttgatatgaccacatgcttctctggatctgattcttaattctttgctacttccctccctgcccccaacccatgggggcaccagaagctgtgggaaaggaggcagcccatcgctaaggaggaggaggaccttgtcagggtgttggtggcgcaggtgaccagaggacagagctcactgctgtgatcctggagagggtgccaggacgctgttcccattaaaggcagtggggcttggagacactgcagcctcatgctcaggcctcctagactttggcccttgctgtggggctcgcctcgctgaaggcaggatgaagggcttatttttctggctgagatattgcatcccagaaaccacagaaatacttccaaaacccccaagataagagtgctcttattttgctccagcgtgaagaggagtttatttcatatgatcaagtaaagcaagtctggacgtcttccttatgtattttcaaaataattattttattatttaaaaaactcaacatattcatttaagagaaatggaagcaacacagaaaatgccaagaagaatgtgtccaacaaaccaaagcaaatatcataaaacatttgatcacattggataaagatcattctagatatttttctgtacagtagataagtaaataagttagacaaacagaaatttatataaaatgaacttgtactagcctcccgagtagctgggattacaggcacttgccaccatgcccggctaattttttgtattttttagcagagacagggtttcaccatgttggccaggatggttttgaattcctgacctcgggacccgcctgcctcagcctcccatagtgctggggttataggcatgagccactgtgcctggcctacatgtttttttaaaaaataaaactgttaagtttaagcttatttgtgtagtcacccagtggattttccctgtctgctgcacagacaaaagtaattcagtgagatggcagtattgctgtaaagaaagagtttaattaatgtgagtctggccaccctggaggactagggttatccttcaaatcagtctccccaaaggctaggaggttaggagtttttcaggatggtttggtgggcagggggctagggaacagggaatgttgattgcttgggggtaaaaccacaagcgtatggaaaacagtccactcgtgttgagtcctctgggtggggaccacaggactggctgagtcatgagtcttgggtccaggtggggtcagtcactcgccagaaatgccagaagtctgaaaaacatctcccagggccagtcttcagttctacagtagtgatgttatttacaagagtaattgaggaagttacaaatctgtgacctccagaacaatggctggttatcatttaactgcgcttatgtgttagcagaattcaggcacctcttataaccctaaccttatggcctttcgttagttttacaaggacaatttagttttgggaagggctattactgtccttgcttaaaggttaaactataaattcctcccaaagttagcttggcctatgcccaggaatgactaagggtagcttggaagttggaagcaagagggagtcagctctgtcagatttctcttgttgtcataattttgcaaaggtgatttcacttgaatgtagaaaaattggagaaaaatgaagcaatcgctaaactttgtaacttttacctcctaagacatgctgatatgaatatgagaaagcaattaggagaaaagatgaaggtagagtcatgttttcatttaacttttttttttttttttttttttttttttaagatggagtctcgctctgtcacccaggctggagtgcagtggtgtgatcttggctcactgcaaactctgcctcccaggttcatgccattctcctgcctcagtctcccaagtagctgggactacaggtgcctgccaccgtgcctggctaatttttttgtatttttagtacagacggagtttcaccctgttagccaggatggtctcgatctcctaacctcgtgatccacccaccttggcctcccaaagtgctgggattacaggcgtgagccaccatgcccggccaactttgttttttaatttggtgtaaaacagatgaactttctgctgtgaaagaagagaaaatgacatttcattttctcccccatcctttcccctcacttcttagttatgtaattgtttcactgtgtcagggttttgtgacattctcttctgaggctatagctttcaattctatttagccttagtaaagtcttgcattttaaagtgttcagtactcacccaggttcattttttgcatagcatcttcttattgttttagttcagatcgtaatggtggaggaaccgtttccatgggactgagaagaaagacacttgtgttgacgttcaggcatacagggaatgaaatctcgggggcagcatgggagaggcagccagagccatggctgagcgtgcttccagggaggcagaacagggcagggtgagcacacatctggagttccactgcctaaatttcaaccgcggctccatcatctcattgctaggtgagcttcggcaagatgtttaagctctctgtgcctcaactgctgccacatctgtaaaatggggacaaccatggccaccgcatgtaaggtgttgtgggaataaaatgagtgatttaaaaatgattacagaggtatctgactcactgtcaatgtttgctcttgttatagaatcacactttttggagatcaatagcaggcaggaaagaattctctgagaatctcacagtcatctcctttctttagttgtttgcagggatcttttaaaatgtcaaccctttttcaatctgcttttgtggcccacctctttaaactttttccttcttcttagatggaaaccaagacctccttacggcccataaagcctgccatggccttagagcttctgccttctcctgcaccccccaggcttcttctccctgcctcagcaatggcaggcagcaacccgctcctttggatggcacttgcccctgcgtcccctgatggcccactctctcccttcagttctccactgatctatcacctcattagaaaggcctctgtggccacacagtctaaagtgtccctcactggaatttgtgtgttttatagcaatttatacaagcatttgcttgaagcaatttgtaattagttgtttgtttgcttcattgtttagttgtttcttgatgtgacttgtctgtactactaggccgtaacctacttgtgagcagggatcatgtctgtcttattcagtattttcatccaacacagagcaatgccaggcaccagcaggtgcttaataaatatttattgcatgaaatatctctgcctctatatatctgtatctctatatagatacagatggacattgcatattaaggtacctacctgtagagaggtagctacacagctgtctatatggatatagatactcactaagtggcctgaattattcaggcaacagtctttccatttcatcattctattttctctttatatgacaattatctaagtaatgaagaattggaatcagggctaggggtggttagaggaagaaatttgaaaggcaagcgacattcattgagcattagttggtggctgcacagtgctggatgttttgtgctgtaattcatttaatttctatagtaacctgtggtattagtccattcttacactactatgaaggaatcctccagaccgggtaatttataaaggaaagaggttgaattgactcacagttccgcatgcctggggaggcctcaggaaacttacaatcacggtggaaggcaaaggagaagaaggcaccttcttcacagggtggcaggacagagtgagttcaagcaggggaaatgccagatgcttataaaaccatcagctttcttgagacttactcactatcacgagaaaagcatgagggaaaccgcccccgtgatccaattacctccacctggtcccacccttgacaggtggagattatagggattacaattcaagatgagattttggatggggacacagagcctaactatatcacctgtgaacaacagacattttctcattttacaaatgacgttgggaaagttaataagcaacagagctgggcccggagactcctgtccattaggtaatgctgcctctgagagaagcaggacttggtgagcactcagcaactttgggcagggtgcaacacctgtaaactccaggatgtaagttgctcatgcagctcccataaatgatttcaaatcacacgtgaaaaccattatgaatctgagaaatgcagaataaaaaaatcatcagggtgggtttgggttcattaaaaaaggaggtgaggctgggcatggtggctcatgcctgtaatccagcactttgggaggccaaggtgcttgagcttgtgagtttgagaccagcctgggcaacatggtgaaacccatctctagaaaaaatacaaaaaattagctggatgtagaggtgcatgcctgtagtcccagctatgcaggacgctgaggtgaaaggatcctttgagccctggagactgaggttgcagtgagccaagatggtgccactggactccagcctgggcaatagggccagaccttgtctcaaaaaacaaaaagaaaaagaaaaaaagaagatgaaatcagaagatttgggtgtagttaaggaaacatatttgtcagcagaattttgggggtgagctggaaattatggaatgcttttctgggtaaaattcaccagtctcaggccttcttttcccaaaatgtgcttcatggagtgttggattacactgaaagttggcatacattatttggaaagagaactctgtgctccagtaagtttgggaaatcctcatttaattaaagagtttcttaaccataagaatcctcagagccttccatatgctaatgtgcattgtcagtttccaaggctaggaagtggcatttctctggatctataaggtctcaagatgcccttgagactgtattctacctgatgcatggctccaggggccttagtggggagcgccacattttccatgttctcatgacagcaggaagccctcagtgaatggaggtacagtgtgcagggtcgcaatcagtcctttccatccgccgcttcatttaagcctcacatcaacctaagacataggttttattattcctgggaggctggccctgttggtgcctgtcaccgcaacccagacccgcttgcccttacctgtagtgcaggtggctagattttgaattgccagcatctgcatttctttgccagaggactttctccagtcactgaagcttgcttgtgggcctgtctacaggtcgtaagtgctagggacttaatgcctcctcaaccagtgaccaacaggaggtgttggatcaatgccccagccccctcaccccttggtcgcaaggctcttctgtttacacataaagccatgtgtagatcctggctgccagagtaccccagtgggattttcctttagttgcccacagtgataaatgcttgataacaaactctttatggatgctttcccatctcctccccactttcctgttcccttactggtgtttcctgagatcacttcccaagttaactatttgtaatcaaatccttttctcaggttctcctgcagaggaaccccaactgagacatcccattttacaaaataatgacaacagcaacaacacacacacacacacacacacacacacacaaaagcaaaaaaacagaagagtctccaagaggttatggaaggtgccctaggaaacagcttatgcatggtagaaccaggacttaaatttcacaacacatttatttagcacctgctatgtaccccttgctatcctaaatgctgagatgacaagatgaaaaagacagtcttggaccctctgtcctaaaccataggcaaaaataaattagtccaggcctgtcttcaaagcctctgcccttaaccacaatactctgctaattctcccaggatggacatttgactctcttttaaactgggagtccatttccataccacccttatgaagagaagctgtggtattcagctcctattctgccctctaggccatgaaaaaactgcatcagatcaagacttttgattcatgaaatatgctagagaaaattgcaagatttcctgactcaatgattttcctgcccagtgtaacatctctcttaattagtgagttgcaattagcatttataaaaagaaatcattgcacaaggtgagtcaactgagatgtaacatcttgctctaaacactgtcctcctggtgtgagtgggatcattcagaaattaggtatcttaatcagctgagtgctccagcattcaaatgtatctggcccagctgggaggccagagtctgtggcatgcataagaagcttacaggagggagggagttttctgtgtacactagcatttgttcatagttgcaaagtagctgtagaaactgcagatttatggccaggtgtggtggctcatgcctgtaatcccagcacttcagaagggcaagggggggcagatcacaaggtcaagagatcgagaccatcctgaccaacatggtgaaactccatctctactaaaaatacaaaaattagctgggcctggtgactctcacctgagtccctagctacttggggaggctgaggcccgggaatcacttgaacccaggaggtggaggttgcagtgagctgatctggcaccactgcactcccacctggtgacagagcaagactccatcagaaaggaagaaagagaaagaaagaaggaaagaaagaaagagagagagagagacagggaaagaaagaaaggaaagaaagaaagaaaagaaaagaaagaaagaaagaagaaagaaaggaaggaagagaagagagagagaagaaaagagagagagagaaagaaagaaagaaactgcagatttatgagaatgattgttatttttcctactttggctatttttaaagttatatttctttgttactgagtgacctccagaggcagagagccacattataattatagaaatttgatctgaatgggatattaagggttatctattaccaacactcccagtcccttcttcctcccttccttctttccttccttttgatgagaaacctaatcacaaagagagaacatgacttgtctaaggtaacatagtgtgttggaatactcctgaaactagaacctacttagaatcaccagaaacttgaagttcttttgttattattatcttctttatctctctcagcggttctgacagaagaatgatcatgaagggaagtttaaattgtcagccaatgtaaggttttgcattatttatgcacttctgccatgtgggctatgctctcagcacttttaaactatccatagtccatagttggttctgataaatgattatttatttgctgtttttcagttttgcttttatttttggtgattgtttgtacttctttaaagcagggactgtgtcttacagtccctttctggccctaacagctcccagaaaagaacttaccatgtaatagggatgtggtgacttattgatgattaattcattttatatatctggattctttccctttgctcacataaatttcctgggtttgaaatttatgcctgtttatttcttctgttggcccctcatgttgtcagtgaaatggctacaagaatggcatttgatggaagaagaaggaagacagggctggcctatttcattctctaattggataatcagtccagaataatgatggtttgattttatttgcaaacctacacctcaggcagtgggtgaagaacaacagcataagcaacaatgcgagtatggtgttcatttacatcctcagtttgtctgtggcaggaagaaagaatccacttattgctaatgataaagtagtagacccactttatttattttcatataaatcatattgtggcagaaattttcatagcccgagaccaacttctggagtttttcttatctgtgagattgttcctgttgtgtatgagctgttttgcagagatcaagaatccctgctcaagtgtgatccatcttcatcagtgaagtcatatgctgcgaggacttctgagatactgtctgctgccacatgaccactaagcagatggttttgtgcctcttgcatgggttctatgaaaagatggagatttcagtgtccatcctctgtcactcaccagtagtatgcagaaatgggtgagcctaacagagttgttaggtcaacaaagcctgccattcaaattcagatcagtgaccttgcactcagggacaaattggggttaggatgcaggctgagattggagacggattatttcactatgcatgggtttgaccaggcagcccaacagcacaggtcttgcccatcaaaatattgtaactgcctaaaagagttggcaaaagtctctaacaaaacaaagggtttatgagctaagcccatcttgcattcatttcctcattccttctacacatatttagtgaaggccactctacactggacattgggatatgaacacaaagaaggagacaagtcacacagccatttatttataggaaaaaaatgttgaaataaatacatgagctgaagactttagaattacaaaatgagacttgctaacttgttttggattggaagaaattagtttatgcccatgacatcgctttattccagactgattagaagcataatgtacatggcaggggcagggagaaggggatgacaatccattctttgaaagagactcttctccccttaggttaaatagatcgtcaagtccttgcatgtcaaaagcagagatgtgaatcactgtccttcagaaagggaagaaaacactttaagcaagtgcaaagttcccagctgtgctaggcacgatggattatacccaaagaagttggacagagaccttgacctcaaggatttcatcgtctatttgaatagaaatgatttctatataactgaattaagccagagcaataaaaatagcatgatattaggttctaaagtgagtgttgcaggaaacagaaggaacttccaaatgttgttatttacagatttctaccttgtgaaatgtagaagtacctgttctcaaattaaacattccttcctcatttcaagatgtcagctacatcagaggttgaccaactatggcctacaggctacatctggtccatcacctatttttgtaaggaaagttttactggaacgaggccaagctcattcatttttgtatcatctgtggctagttttctcactccaatggccgcattgagcacttgcaatagagattgtgcagcttacaaagcccaaaatatttatgatctggccctttacagaaaaaaattggcaacccctgatttagattatccaggttgatcctggtgctaatttagagcttcagaataaaacacagctgaggtgtgcctggtagcaaattaatcccccccaaaacaagtacttcattttccttaaattaatgttgagcatcagaattaaacagagctaaatctcatgatacctgaggcccttgtgaaaatgtttttgctgacccaagattcagtgttatgctttctgtccttacagagagctaaatcaagagtccccttttggaaggagtacctctgttctttgtaaactgtaattgaagatataactcaccgtgttcttcagtctttattcaaagccgctggcacaaaaattctgcttgaatttaattttaggatagatttgatctctgaattggctttataggttttctcagttcacaatagtcataacctagttgtttctctcttgccataggtgacaggcaatgcagagccaatttcagaagtgagctcagtagtaaactcatggcaggtgcaggatgaggcaagagagaggcctgggtgcaaacatgagggtggctcattcccagggctatgcaaaggcagggtcagtcccaaaaggagcacctccttacatgttgtgcctgaagtgtccctttctcagtcttttcttggtggtggcaggtgctgcctggcaatccccatcccttctacttttagatggtgggggccctgtcctgctttatccttgtatatggcgcttttattttaaccatgtaaactgattcaggtcctccctgtagtcaacagagataaaagtctcaataatcaaacctgtgggtacttcagtgaccagggaccaccatctgtcccctgtgggtccagacatcaggcaggaggaaaagttggggccatgtgtcagcgtcccagctggggctcaccatgggaagtgggataagggaggattattccagttctcttctttgagttcaggtttttatctacgggaagaagagggagattggacgaggttagattcacttgtctccaatgtcctgcatggggttctgggacagacaatgcctcagaaatgggaggtccaagaggatggtgactttcactgctagctgatgatgaaagggaaagggatgagggaagaatgggctgaattagaggctattccacccctctgatggttagctttcagggggaagggaaggagggagggaggctggtggggtgggagacaaagacgaattggagattaggaaagattctttggaatagtcaaaccagagaccaagcaaagcatctttttcccttgtaacttgagacctgtgcaaatgacacaggcttctagttcccaaacttaataagagtaagtgcgtgaagaagagacctgcagacacttaattcaaacagtctagaattctgggaataagttatagtacaagttatatgtggctggttatagattcagccttgatgtttatgttccctgtttcaagtcacacacatcagattactcacttgtcagctaaaaatagggccatcactggcttgcaagtcgagttaggttttatttctctatgtgcttcattgttcgttcttttgtgctccctcctctgtgcctggccccctctgccatgcccaggtggcttcacagtcccccttccccatggtcaatacttctttctaactgagggataaatgactctgaaaaggaaatgtatttcaatggggaccaatccattacacccgagagagagaggccaagtgcagggacttctggaggagaccaggaatgagtgattatgtagcatattctgtgtgaaaggcattttaaaacacacgtagatcaatttattgtcacagcccctgagaggcataattctcatcttttttctttccttctttctttctttttttttttttttttttttttttttttgagatgaagtcttgctctgtcacccaggctggagtgtagtggcaccatctccgctcactgcaacctccacctcctgggttcaagtgattctcctgcttcagcctccccagtagctgggactacaggtgcaggccaccacgcctggctaatttttgtattttttagaagagacgaagttttgccatgttgactaggctggtctcaaactcctggcctcaacctatctgcctgccttggcctcccaaagtgctgggattacaggcatgagccaccgcgcccagcttctcatctttattttttacatgcagtcatagacattcaggtttcatataagcagccagggtctctcagtgcatcaggagcagagccagggtcaaaacttacatccatttgaacccaaggcacagttttttcttactgggtaatgctgctgtcttatgggggaattttaggcatcaataaacaaggaagagaagaaggctaatttcttttgggggctggtggatcgtcccctaaaattatgtagatagtcatctttcctatcttagctaaatacaaatgtagattgtaaacagctcctcaagactgtacattttttgaggatagatttagagcaaatcacatttgtatccccaatatggttagcccagtatctggctcctagtaataattatagcaagcactgactgaacatttcctatgtgccaaggacaattttaaccgttatagatattaattcattcctcacaataaccccatgaggtaggttactattactgttcccattttatagttggggaaactgagatactttgagttgaaggaacttgctaatgctcactcccaattaatggcagagctgggatttgaatcctataacactgggcccagattccgtctcttttctaaataggtactccatgaaaatatgttgttgaataaatgtactattactttgtacagggttgagggaattagatatgacttcactgaagaggtcaatttcgtctgagttcatttcttggtcaatatttttaaatgaatgaatggattccagtgtcctttttctctgaccacttctgtctcagaaaaacaagcctaatgcagaggaagaggagcaagggagttttcccagtattggtagatgaagatctatgacttcagagacaaatgaagccctcctagaattctttcaggcagacaataccaggtggcaccatgggacacactggtgggaggagtgcaaaatgaggatacagtttatgacagttttttttggaatagacacatgtccagagaaatgggcccacattcacttgtatgtgtgcatacgtttgcatagaattctcttttaaatatttcaaatttataagaaatcctttcttgtgatgaacagatttatcttgaaaagtgtttcccattttaaaagtcagagacttgaggcagggttggaataacttccaagagcatgtggctcgtatgtggagatgccaggaaccaaatcccctgctgctggttccagggaccacatttattgccacacctacagggtcctaggaagaggctggcagatgtgccccatggagataggtggggtttttatttacagtaggagaccagattgcccagtgatgatggggcattcgatggcagaatatagaccagtttgactgggccctagtgctttggcagatttttggaggagaatttgctgagtgtcagaccctgtgcagagctttgcaaacatcgttttctttaatctggatagttcgtctgtgaagtagatgtcataatccctatttcggagatgaggaaatgaggctaggagttacataacttactcagatgtgcagctgctggtggcagagcctgaatacaaatccttcacttctccaattaaaccagccatctctgagttgcaggggtttcatgccatactgcccactggaagttgggagggaatttacagggttacagcagatgatctctgtttaggcatcaggtgaaactttagtgttccctaaattggtacaagcagactctgtttgagtatctctgttgacagggagataccatctaacatggcagcccatctcaatgtttttaataagtatattatacatgcaataaaatgcatagatcctgagggtgcattcagtgagttctgacagagatatgcaccactgtaaaatggtctgtcatccatatcaacatagagaacatttttactatcctggaatgtttctttatgctcatttctgtcaatatctgctctctcctcccttgaacataaaaaaatcactatcttggcttcaatcactatagattagtcttgtctgctctcaatttttgtatgaatggaatcatgcagggtattcacttttctaactagctcctttccttcaaaataaggtttttgatatttgtatatattgttgtatatattaataatttcttccattttattgctgctaatattccattatgggatataccacaatttgtttatcaaaccaccctgttgatggccattaggttgtttccaactttggcttattttgaataaagctgttatgaacatccttgtacaaatgattttgtggacatatatttttttttcttgggtaaatacttagaaattgagtctctgggtcataggatagatgcatgtttaacattacaagaaactgccagttttccaaaggaagatacaccattttacacttctactagcaacgtgtgagggtgccagctgctttgtttcttcaccaacacttgataatgtcaacttttaaattttagccattctaatggatttgtggtgccatcttgttgtagttttaatttttatttctgtaagttctttgtcatataaatgtactgcaagtgtttcctcttaatctgtggcttatcttttaatttattgtctttttatgagaagttttttattttactgatatttaatttatcagtctttttaaaaatgtgagtgccttttgtgtcctatctaagaagcctttgcttatccgagtgtcctcaagacactctgctgtgtttgtttatagaggcttcagatttagcttttacattgaagtcagtgatccatctcaaactaattttgtagattgtgttaggtaagagttgagactgatttctttccctttgtagatatccatttttccttccatttgtggcgatgactttatttttctcattgagttgtattggtgcttttgttgtaaatcaattgattgtatatatatgggtctatttctggactctgtttcattaatcaacttgtctttttggggggcacgacacattatcttaacacaacatagtttcattattttttgatgcctattaaaatgatcatatgatttgtcttttaatttttcaatgtggtgaattacattaattaattttcattttttaaaccaatcttttactcatgggataaactctatttactcgattctaaagtattattctttttatatactgctggattcatttgactagtatttatttaaggattgttgtgtctatgttgatgacatatatttttctgtaattttttttcttttcataatactcttattaggtttcaatgtcatgattattctggcattataaatcaagttgggttctcttttcctccagtccctgaaagagtttgtgtaatattggtattatttccaccataaatatttggtagaattctgcagtggaaactgcctgaacctgaaattttctttgtgggaatgtttttcattgaagtttccatttatttaacagatatgtagctgtttacattttctattttttcttgtgtcagttggagaaaattgtatttttaaaggaatttgttcatttcatcagggtgtcaagttttggagacataatattattcctaatactttaaaattatcctcttagtgtttgtaggacctgtagttctgtctatcatttccagacaactttaggtgttggagagttagtttctcaccaatttctttttaaacacattgagtttctttcaagtcaggaccaggccatctacttccctcttcaagatattcgtcatgctgttccctcggcctaaaaaaattgccatcaccataatttttttacctggctgtctgctactatatcattaggatatagaattattgtgaagcccttttgcgtatgtatgtcacattttccatacacattcactcagatacacatttatgtaacatacacatacacatactcagataactacttggggtttttcctttttcttttttgttttctttttttcttttcttttctttttttttttttaaatggagtctccctctgtcacccaggctggagtgcagtggcactatcttggcttactgcaagctccacctcccaggttcatgccattctcctgcctcagcctcctgagtagctgggactacaggcacctgccaccacgcccggctaatttttttttgtattttttagtagagacagggtttcaccgtgttagccagaatggtctcgatctcctgaccttgtgatccgcctgcctcggcctcccaaagtgctgggattacaggcatgagccactgcgcccggcctacttagggtttttctttacagcactttaaccaaattgttaattacagttatgatatattgtttcactctctgattatactataaatgccaccaaggctggacttgtgcattgttcctgttaatcagcaaatacccagtacccagcaaaacgcttggcacataatagatgctcaatacgtcatggtcaggtgaatgaactaatccacattgagaagaaatgttatgctttgaaaattctaccaataattttagccttgctagaggtctgaaaaaataggtggggattaaattatgaggagcctcagctaacaacttgtggaatgtggatattttcctgtttatatttttaatgtttcccctctctctgtctgtgtcatatttttgtttacactcagtaccctgggaagggagactttcatagtcactctgggctgccttaacaagatatcaaaaactgggtggctgaaataacagagatttattttctcacagttctgaaagctggacatctgagatcagcattccagcatggtcaggttctggtgagggctctctttctggcttgcaggcggctgccctctcactgtgtcctgacatggcagagagggagaaagagcaaactctctggtctctcttcttataatggcactaatctcatcatgagggccctatcctcatgatcttgtctaaacctaatcactccctaaagtacctcatctccaaataccatcacattggggtttgggcttcaacctacgactttggcagggatgggggtccataatgtagcctgtaacagagaactaagagggggctggggttggtaatgagagaagatgctgaaaacaatgggacaaagaagcagggggtgggccaaggagctctaatgagtgtctcctcccatcttcctctggatagcccagaatccctcttcttcctcagtcctgtatgtaggattagcagaggatttgcgtatttgggttatgttagtggtgggaggtggccacgacaggaggagtaggacaattcagtttttctttcttgttgggcatcacatcctctaagggaatcctccttatgagtcctcagttgttaagcaggattactaaaataaaagaaacgacttagtgggccccaaactgcagcctctctcacactctattctataccacttgatttgaggaattatagccttttctctttctatccccctaaaccatgtccaaaggagcttacatggttatttccagcgtgaagctgattgatcagctcgcaggacatcgtggatcagagtgcttcccccgcccctcttaaccgcctttctgatgtggctgcgtgcatccagtgcccagagcatgccggggttcttgcaagagggactggagggtgagggaggagagagtgtctattggctccaccaggacatagatgctggtgacccacactgcgctggacaggaggacctgtttgcagcacgggtcagaggaacacaggctcctccaggtctttccagagcattgactcctgcaagaagtgaatggaagggagccgaaagcctagcccatctccctccttctaccatgatccccagtaagattctggtgtaccgccacccatccagcagaaccggcacagagctttacagacccggcaggcgccgcaagaagtccctgggggacctgttccataatggctaccgggtgaagtctgggcctgctgctccggagaaggaggaaccgccgaacttccggcagtcattggtgtcttgctgtggtgtttgtgcatcctggggtaaggactcacccgtccatggctcttctcctcccaaaagtattccgtattcctggaggctgcctgggaaaaaaagtgctttccgtctaggctggatttggggaactgtctagtggagaggtgatagccaccttgattcctgttttcttggcatacccacccaacgcagatgtgctgggtgaggcagaaatctcgtccttcctttttagatgaatttaactggcctctagtgctcctgaatgttattgagctattaaagaatatatttcagaaatgtgggagaaagtttggcaaacgatgtaatagcttgcttcctatttattaaatggcaataattttcagtgagtcagcatttttggaagaggcatttggacctatcgataatttttttttcaggggctacagtgcgagttgtggctcattttctgtccttacatttgaccatgggagcgtggtcttgcctgtcttgggtggtacttttttattcttacccagcagagatcataagaatagttttctaggcagattttcttttctcaactgctttctgataggcatttggctttatttaggcatccataatatattacagtttaaaacaaatagattaaatgtacatttctggccataaaaatgtcagtcttagggagggatagcttttatttccaggaaagttagcagtactaggaatttctttaaaatggaatgtagtccctttgaaacctagtttaggattctgatgtgggtaggcacagctcaaatacttctgcattatgtaattgtgcctaacaaaattccagttggcaagcaataagtgaaacctagtcaatccttttcattagaactgatataaaatgtttctgtcagctgaaatgcctggaatctaaatattcatgcttctgtgtctataaccctagaattagctggccagattgttatatttcctctcccttcatcacagagaagagctgctctgtactgtaacatctggccttggagagaatcaggattaaagccactagagagaagagaccaaatgatggaattattaagctaagggcacatacactacttcctgagaaaacgttgaataattgagtaaaaccatgggtttaacttagtatccaatacccttcttacttttcctttgaaaggattaatgcatttattaattttcagtagtgagtactcactatgtaccagtcatcactgttctagaagagggtgcacttggtagtgagccagtgagtgagacacctgccccaatagagcagatagtctgctgaggaacgggcaggaggcaggcacctgaacaagcaaatgagatcattttagattgtggtaaaccctataaagaagaatggataatggcggcgaaggactgggctccagatcgggtggtcagagaagacctccattagccaaccttgcaatgatctgggggaagaacattcccaagaaaagaaacagaagggaagactcagagctgaggacgaactgggaaatgtttctggagcagagacactgtgtgcagggcgtgaggacatggagagtggtgatgaaatgagcagaaaccatggagagccttccagagcgagataaggaatctgaaagtaattttagtgagatggatgccatgtaatggcttttggcagggagcaatgtaatctgatggatatttgaaaagaccatgctggctgctttctggagaatgctggtggggcctggggggactggggtagagaagtgaagcaggaagacccgtgtggggctcttggtccagatggaggtaacagcagtgtgaaccatggttctggcagtggagagggaaaagataagttatttcacatatatttaagatgtaaagtcagaccaggcaaaatggcttatgcctataatcccagcatgttgggaggctgaggtgagaggatcatttgagcccatgaggtcaagactccagtgagctatgatcatgcaccccaggatgggtgaccatgagacactgtctcttaaaaaattcaataattttaaaacaaagtaaagaggtaaagtgagtaagtcctatttgtttacttttaaaaaatgtgtttctctacttactggctcctctattcaaatagaagacctggaagcaggagcctcacccctgtgctgcagcatctggaaccacaaggggtggtggaagcagtgactctgtgcatgtgtgtgggtgaatgaatgaatgaatgaatgggcgacaatcccagtctgaatatcaactgatgttgagcatctatcagaacaggaaccaggactgggttaaggtagggagccaggattggcaacatggtgaaactgtgtcactaaaaaaatagaaaaaattagctgggcatggtggctggctacttggggggctgaggcgggaggatcacttgagcccaggaggtcgaggctgtagtgagctgtgatcgtgccactgcactccagcatgggtgacaaagtaagaccctgtctcaaaaaatttttttaaaaaagtagggagcaaaacaacctgaacaattaccaaaggaaaggatggtgaaaaggtcagacaagcaagaactgtttatagaacacacattctgactgtgggaacaaaagcccaggggcatttgagaggaagcgagacagtcctttttctccagctgggaaggagaggctcagattcactctgtgctggggctaagaagcaggtggtcctcacagtgaccaagctggggatgggaggtgggacctgtgatggcagaagggtgcaggggaccaccctgaagaagcctccccatgctcctgggcatcctctgtttaccctgatatgcctgccctcagtttgatccctctgagctgcaaggccagataacaatgaccttgtcagacaccacaaaaataattgctcttcaggatttgcgtggggctgcagagattggaaacgacagacgtttattggaacctttcagctttttggatttaaagattaaggagtgaaagggaatggaaaatagcaaattggaaaaccctggcaggctttctggtatgggcttggatgtgtttgctgttgtgttttctgtcttgtcctctcccgagacctcacatgtatgaatctccagagtcttttctctctggggatcacaggaaccctgaagcagtgaatgagttatcatttacctgtttatccctcaatttctgtcagtacagtaactctgcttttatctgagaagggagttcaagatcccttaatctgtctggtcattgctaaaattccacagcaatagttctcaggaggagcctcacctagttgttcaggccctgggcagcaagtttcgaagggaaagctctggcagggggtcctcctcacctggagccaatggtctcatgtgactgaatcttgcatgtgagtacagggctcggagccaggaaaacctgtattccagtcctgacttgccactgactttatgactacagcaataagtaattatgcataaaaatagaaattttgatataaatattacaaaaaaattaaaaaactcaagaatattaaagaaatccaaaatgtctgcctttgtaacatggccactgtcatcattttatgcttttcttctactttttcattttacacatacctatagttttcatagttttatcatagggaccatgcacttcatcttttacttcttttttttttttttcagcatttccaatttgctatttttaaaaaattgtggtgaaaaacacataacataaaatttaccattttaattatttttagtgtacagttcagtaatgttaagtatatcctattgttgcaaaacagagctccagtactttttgatcttgcaaagttgaaactctaaacccattaaacaaataatttttcctctcccctcagctcctggtaatcgctattttaatttcgacattctacttctttaacttaacattatgtcaaaaattttccttgttacaatctttgagcatatataatatcctataaagaagatgtatcagacgtaagacctatttttggattttaagctgctttctatttttcttgcttaatgaacaattttgcaatgagcatctttgtttctgtagcatatttccatattttgttatattttcttaggctatattcccagaaatggaattactttgattaataatgctgaattactttctgaaaaggttttatcagtttataattccacaatggaattataagactatttcattgtagagtcatctccactaggtgaagctcaaatatgttgctattaagtagaataaatacagtgcttacttatttttgtttaatttgcatttcttttaattttttaaagcatttttcaagaatactatatggttattaactatagtcaccatgtaatacagtagatatcttaaacttatttctcttatttaactgaaattttgtatcctttgaccaacatctacccaaccacccttccctccaaccgccccagcccctctttctatgagatcagctgttttatatgagtgagatcacgtgatgtttgtcattctgtgcatggcttatttaacttaatataaactttaggttcatccacattgttgcaaatgaaaggatttattcttttcttggctgaataatatgccattgtgtatatatatcacattttcttcattcatctgttgatggacactgcggttgatttcataccttggctattgtgaatagtgctgcaaagaacatgggagtgcagacatctcttcagcacgttgatttcatttcctctgaatatatacccagtggtgaggttgcttgattgtatggtagttctatttttgggtttttgtggaaactttttacctttttccataatggaaaatagtactaatttaccttcccatcaacagtatgcaagggttcctttttcccacatcctcaccaacacttaaccttttgtcttttcgataataacccttctaacagatgtgaagtgatagttcattgtagttttaatttgcacttccctgataaatagtgatgtcaaacattttaaacatttactgttggctatttgcatttcttcttttgcgaaatgtctattcaggtcctttgcccatttcttaattgggctatttgctttcttgctattgagatgtgttctctatatattttgaatattaagcccttatcagatgtatagttttcaaatatttttctcccattctgtaggttgtctcttcactccgttgattctttcttcctttttttttttttttttttttttttttttttgagacagagtcttgctctgtctcccaggctggagtgcggtggcatgatctcagctcactgcaatctccacctcccgggttcacgccattctcctgcctcagcctgccgagtagctgggactacaggtgcccaccaccacacccggctaattttttatatttttagtagagacggggtttcaccgtattagccaggatggtctcgatctcctgatcttgtgatccacctgccttggcctcccaaagtgctgggattacaggcgtgagccactgcgccccgcctctcttcactcggttgattctttcttttgttgggccaagctttttagtttgatgtaatcctctttgtccatttttgcttttattgcctgtgttttaggggtcatttccaaaaaattattgccctgaccgttgtcatggggctctttctcaatactttcttctagtagtttcacagttttggatcttaagtcattaattcattgtgagttggtttttgtatatggtgcacattttttttatttgaaccaagttaagataaaatagtttcatttaattaatttatttaatgattattcactagttatattatctacttcatgatgtagctgtttgatttttgcctacttatcaactaatgataaagtattttacatacatgcttttgacattacaaagaatttatccttattgtatcatatttgattattttttcattggatattgtgtttattatgattttaaacatgcagaattttgacgtttttatggtggtggcagagcctgtatttcaaagattgtatgactccttttacacatgaaattagaaattcttcttttcagagggctaataatatatacctatattttcctcaatttttctgtcccttattatctatatttaatttttaattcatctcaaacttatttccattatggtatgaggtccatcattgcatgatgcctgtcttccttttgatttgtgatgacctctttattgtctgtaaaattcttctgataaaatagagtctatttctctactgcttagtcattgttgccatgctcttattactttcttattctattgctttgtggtaaatgtgacttagatgatttttgcattttagattttgatgaaatttctttgtggcctaatatgtggtcagtttttgagactgctcatggctgttattaaagaatgtgtgttcctagtttactaatatatgtgtgtgtctttctgcccatccattcagatacatatagatacgaatatatcccaagggattaaatgctacttaaatgtcctatatttgtgcattcttgtcatatttgctttatttatctcaaaggaatacttttaggtgtataaagtttttttttgttacacattctttgtggattgtttcttttatcaatatgagatattactttttattctttttaatataatgtttatatataatttttatataactttttgcagtagctgccactttatttgatatagtcattgctctatttgttcctcttttctcagcatttgccaggcacataatttccattctttcatttctaacttttctgtatgtcttgtttgcagtgtatgtcttttaaatagcatgcgcctggaatttattattgttgttgttttcatatcatgtgaatctctgtctttccataggtgaaagtaattttaatttaattttattatgattacaaatatatttggactcttttgctattgtaactatgttttctgattaatataccttttattttttttttcttttcattggatgggctgaagtttttgttctttttttcttttctccatttgattaaattcctttgtccttttttttttctctaggctatggaatttatatccttaaggttttgatacacatactttaatttttttctgttaatatatatgattgattgtatcctatcaagacaagaatttctgcacacctttctttttcccattgccctctctccttcacacctccatcttccatttatttccagagattttaattttggatcattgttattatttattcatttaaaacatactcagtcaacacataaatgaatccattacttttatcttttccatgttgcttcttgtatcttgcttcttttggatttatttttctttcaactggctaagtatatattacttggttcaaattaatctgtcctgagaattgtaaagatatccttcttttgttttcttgcaaccagtgaagccaggagaattgtgacaataatttgactcttgttgctttgaagggatttatttcttcacattgatgttataaaatttatccacaatatgcttggatttaggtctttgaaaatgtaatctgctggccgtggggcggagcttgcagtgagccgagatcgcgccactgcactccagcctgggcaacagtgccagactccatctcaaaaaaaaaaaaaaaaaaaatttaacctgctggacacttaaaagacctttccaatctgaggatacaggtcattctttcggtctaggacactttaatgttattttaaatgtttcctgttctctatttccttcattttttccttctggcagctcaattacatggatgtggaaaactttattcctgttttctgggtctcttagtttttcttttgcacttttcattcctgtgcccctttgtatgaagatggctgtgtgatagttcagccctctactttgctgtgtggctatgcccattcttctattaagctggccttttaagattttgatgttcaaaattttaattgctaagatatttagttgattttttgagttgagatagtttttcacaactctttatatttttcaaatatttttctaaagcattttttgtttaatgctttgttaatgttgtatccttaagggtcagttggcctgaagtgtaatatgtgcatttcttgaaggaaagttgcctttcctcaaatgtttggcaattctttagttcttttcttcccttttcttttcttttttttttttttttttgagaccgagtcttgctctgttgcccaggttggagtgcagtggcgcgatctcagctcactgcaacccctgcctcccgggttcaagcgattctcctgcctcagcctcccaagtagctgggattacaggtgcctgcctccatgcccagctaatttttgaatttttagtagagatggggtttcatcatattggccaggctggtctcgaactcctgacctcaagtgatccgcctgcctcagcctcccaaagtgctaggattacaggcatgagccaccgtgcctggcaacagctggataaattttcacgaagagaatgcatttgagaagccaacgctcagctcaagaaacagtcattattgcctgtcaccccctagtcccttctcctggcaaccttctagtcactacaccccacaaaggtaaccactctcctgaccatatatcagttttgcccagttttgaacttcatataactgggttatatagaatgactctgtgtcaggccttgttctctcagtgttacgcctgtgtgattcatccatgtggttatatgtagatgtacttgacagtgtttttttgtttggagatggagtcttgctcagcctcccaaagttctgagatgacgggcatgagccaccgtgcttggcctgttttgtgcttatctttgcatttgagatcttctgttagcctatatgtgaatgctgtctttgtgtgttgcagtttgtctggggagtactgagatatgctactgtgtgtttctattcggtaactggtcttacagctgtagagacagtgtgtttcttccaagagttacagtttactcaggatattgctctattttaacacctcaagtgtatgcacttgctgccatgtagtgactactcctgtttggcaccccagtcaatcagtgttattgtcacagcctccttcttcccagggtcagccacttcatttcaccttttggatggttgttttcttcttcactgtgatctctgcatcccaaccacccccccatcaacctcagtctttatgtattgaccaaagacatttttaatattctgtttatcattgtggagatagacatatgtgtgtgtatatgtctttctttctcattatggaaatatatacatggaaaatatatgtatatgtttatataaatataaataaatacatatatatgtatgccaagtcagtttctaacagagtatctacccacattttgtgttcgtctgttctgtgttgtaatctcctcttccattctttttgttcttgtgggattctgctgtttcctaccccctcaacatttgtattagtttagtgaagttttgagagggggcagacataaaccattgtgatccatctgctatgtttaactagaatgctctggattatcattttaattcattgatgaataatttatgttggtattatatacagaattttggcatctatgatcttagtgatattagaatacagatgcttctcaatttaaccatggagttacatcctcacaaacccatcataaactgaaaatattttaagtttgagaatgcatttaatacccctcacctaccaaacatcacagctgagcctaccctatcttaaacatgctcagaacacttacattacctactgttgggcaaaatcatctaacgcaaagcatattttataataaagtgctgaaaatttagtgtaatgtattgaatactgtactgaaagtgaaaaacagaatggttgtgtgaatacttagagtatggtttaaggtgaataggtatcacttttgcaccactgaaaagtcagaaaatcattaagttgaaccattgtaagttgagggccatttctactttatttttgtgctttgagagtcagtttttggtcctcagtttatgtttattttataatataagttagtagctttagatctcgttttgtattatggaacagtttagaattttaataaaatgtatgtgcaataatttaatcataaattatatatgggtgcagagtctgtaagggaagctgttactatatatttcaatgtatatctcaattgttatcctataatggatttcttttttgtgtgtatcaagtttcgaagtttatatttttcagaaagtcatccctctcactgaggtttttcacagatttattagaatatcattgtggataatttttttctttttttattggatcagccagaactttattttgtttgttttcttgttgccattgtttgctcccataaaattctacagatttttaaaattttttttcatatttattggttttctggttatttagtcataaacactgaactaaaaaatcagctttctcctattgtcaagactacttttcccccaaaatcttaagctgaatgctttgttttataaataatcttttattgtattattgatttaacttctagttagccagtatgttctttaaaattgatttaaatagactggtagtgtgcttagagggtagattactggttttaaattactcaagtgattactcggattaacggaaatttgctatttggagaaaaaataaagcattctccttttggcatactactagccaaaataaataaatacatcctgatggattaacaagttagaggttaaaaaaagaaaataaaagatactctaaagcagtgattcccaaacttggctgtacactggactcatcctcatccatcatctggctgtacattagaatcttcttgattagaaaaataaagcttggtccttttggtgcactgttaaccaaaataaataaatacatcaaaacagattaacaaattaaaggttagagaaaagaaaatatattctgaaccactggttcccaaacttggctgcacactcgaatcagaatttataaaaattctgatgcccagcttgtatcccagacccgttgaatctggtgggaagcaggcctcagtattgctttaaaatcctcgggtgattgcaatggcagagaaatctggggaccactgccttgcagccttgttttcccaaagtgtggtcttctgaccaacagcattgacgatagcttagagcttgttagaaatgcacagtatcaggccccatcggagacccactgagtcagaatctggatgtttacaaatgccaggtgattcatgtgcacaatggatttgaatcccatgcctccaaagcaagtgtagaaaattagtgtccatggcctatttatatgaataacattttactggaatatggtcacacctatttgttttcctattatttacagcaaagttgagtcgttgtgacagcctaaaatatttattaatatttactatatgttcatttatagaaaaagtttgcaatgcttcttaacctggatggctcattagaatcactctggagccttaatactccctctgcctgaatgtaccccacgcccattaaatcagaatgcaggtagggggtgctgagacccaggtgtcaacaattctaaaagtttcccaggtgatttaaatgtacagtcaaagtccagaaccagtgccccaaaagtacaaagaaaaaaaaatagatgcagtaaaaaaaaaaaaaaaaaaattatctatatgatggggatggccaaaaaaattttaaaaaaagggaacatggtagaaagattgatatattttagaattcatggggaaagaaacccaccttaagtaaaatttgacagtaggaaaaatactttaagccaaattgagaagaatgacgaacggtgggagataatatatggtatacaaaatcttctttatatgagaacataattgtattactacaattaagataaatacacaggcagactggcaaaggccactctaaagcactttagagaagaaaataaaatgactaataattatatgaaaaaataattagcttcatttgttaagatagaaaagcaaaataaaacagccatgagctcttatttggggtctatcaaattaggattttttttttaatttttaaatttttaatttttttgagatggactctcactctgtagcccaggctggagtgcagtggcgagatctcggctcactgcaacttccacctcccaggttcaagtgattctcctgcctcagcctcccaagtagctgggattacaggcacataccaccacacttggttaattttttgtatttttggtagaggcggggttttaccatgttggccaggctggtctcgaactcctgacctcaagtgatcagtccacctcagcctcccaaagtgctgggataacaggcatgagccaccatgcccgacctcaaattgggattcttaccctcgttctctccctttcccctcctgccttcctgccttcctgccttctctccttctctcccttcttgccttcatgccttctttccttccttccttccttccttcctattttctctatcactgtactcaatccagtgggaatacaggcaaaagagcatttgcatactgaagggaatgcaaattgtgaggacaagttggtaagatgtatcacaagtcttgaaagtgtgtgcttgagtcctaatgtctgaattggaaatgactggctgaagtctgtacagggcagtggctagaagcttgggctttgtggagtttgtcacatttgtggtgaaacttggctctgttgctttcaaactatgctggatacactgtctcatttgtgtctccttagctattttcttctgtgtacgtattttttaaaaaagatatagttagaagttttagtgtgtgtaagtaaataaacatactagatatcatcaataataatagattaatgtcattgtcaacatcatcatttcaccagtaatttaaaataatagtaacactatatgtactctgtgtgtgtgtgtgtgtgtgtgtgtgtgtgtgtgtgtgtgtgtgtgtgtttgtgtgtgtgtttctgggctttctagtccagtttgatgacttttctgtggcgtgtgtacactcctacgctattgtaattcttcatatgatgaaattaccatttactgagtgcctccagtatgcccacatggactcttagaatgctcggtcttctggtatgcagatcaccagggtaggatttaatgcccatgcctgtgagggaataagggtggagaactcaggctggctgcagctgcctgggaagcctcaacccatcccacaggaaaaagtatcccaaattgaggcaaggcagctgacctttgtccctacatcagccagcatttgtgtgtggtggtggggggggggtgggggggtggggggcaccaccactgacaggggatgtagccccaggtgaggcagctccttgtagcagagggcagttctcatgaagggactagctctgagcctttagcaggtcactcttcaagagcccaggacaaataaggtccctgaagaggggatttgggctgtaccctacagcatctgctatagctcatgtcttttattcatttaatgcagtcttggatatgataccctagtattttatttaggattattgttgttagtcattagtgtgataagcttgccatttaagaaaaaatgcaagggaacttgtgtccaggtaatgccaactttctaaaccaatacagagcatggaaaaacacagataagtccatttttaagaattgatcatataatagagaatagatagagaagttactattttttgaaactgtaaaaatctcacttgtaaaactctctgaacctggaagcttttggggagggcatgtaattcctggcttttggtatatacacattttcttcttcacaactctattatagctattttgtgttaccttagaaaatcatttatttcagagattttatagaataaaaataataaaagatattataaaatagagaagatgaataattgtcaccaaagagttccccctctcacctctcttatcttggtctcctctcttagcctgaagtcgctgtctgtagtcttctgggctctttctgggtatagccagagtggtcattcgttaaggcttttccctgatgaggctactttctacttcccaagagtgcagccctgacctctctcaggggaccccgcagggcttctggcttttccctttagtaggcaacatatagtctcagaattctgaatgtggattatctaacctttaactccgccgtctaattatttctcaaaactttgattcactcattcagttcaaacaaggatttattgagccttcaccttatgccagacactatgttcaatgctggaaatatagccctgaacaaaacagacatcagctcctcccctcatagagctgatgctaaagagaggaaggcagaaagtaaccacataaccgaggtgctagtgcttcatgctgaggagaaaagtgaagcaggaaagaggatagggagttgcacgggtggtgtgggaggagttgcatgtttaggtcgggtagccagggaaagtcacgctgatcaagggacattgagtaagaacccaaaggaggtgagggagtatgccatgtgggcatctggcaaacagcattccaggcagagaggctgcatgtgcagaggccctggggcagtagcatacctgtgtgttcaagtgtcactgaagacatctgccagatcagcggacagtagtaggagtgacagtaggaagccatcagatccaaaaggagatagtgctggtggtgggatggtgttgctttaggcctttgaaagactttgacttttactctgtgtggaatgggtggcattggaggcttctgagcagagaacacaaggggtccagggcagaaagcggttaggaagctgatatggtttggctgtgtccctacccaaatctcatcttgaattgtagttcccataatacccctatgttgtaggaggggccctgtggaaggtaattgaatcatgggggcagttacccccatgctgctgttctcgtgatagtgagttctcacgaaatctgatggttttataaggggcttttccctcttatgctcaacacttctccttcctgccaccatgtgaagtaggatgtgtttgcttccccttctgccatgactgtaagtttcctgaggcttctccagccctgtggaattgagtcaattaaacctctttcctttataaattacccagtctcgggtatgtctttattagcagagtgagaacggactaatacggaagctattgtgaatgattcctgaaagaccaaccatttctccagatagtctggcttgatctgaggatgaaatgtagactgacttttttaacctatggagaacttcattggctcatttgcattagtgaaactcagtgccataaaaatgcccagtatgaggcagtcaaataagcaaaggccacccttgttcagcccacaggggtcttgctcctgcatcaccctgggtcccttttgcaaggagatatttccctctggtctccatgttgggaaaaataaatgattctcctgcaagccagtttgtttttctctcatatgtatacactattgatcttatcctgtctgcctgcttgcttttgttaagaaggtgctcagagctagatctgcagtttgtgtctagcaagagtataggaccttgtggcctctgcattcatttctttcctgcccttactttcatgcaccttaattaaaagaaaagcttttattctactatatttgtgtaactcactcaaatgtggcaagctgccaatcagcaatggatatacgatacaaacaccatcgtttaaagataaaaagaagaaatccagtttgaagttcaggttgtttgtattctatttttagttccataaataaaagcatatctatgcacacacagaatgttcaggattaaacactaaatggctaatacattgctagcatgtatttctacaggagtgcctcttatctatggttttgcttcctgaggtttcagttatccccaggcaaccgtagtctgaaaatattaaataggaaattctagaaataaacaattcataatgtttaagttgcatgctgtcctgcttggttccatctgggacaagaatcctccctttgtccagcacatccgtgccatctgcactccctggccattagtctctcagggcacttcagtgggcagaccgatgtcttgctgtaacccatgttacctgtgttcaactaacccttattttacttaataacggccccaaagcgcaagtatagtgatgctggtacatattgtcataattgttctattttattattgccattgttaatcccttcctgtgctaatttataagttaaattttaccgtaggtgtgtgtatataatgcatataggatttggcactatctgaggtttcaggcatccactgggaggtcttggaatgtatccctcaaggaacatggaagagtgttgttatctttcatagtttcagtgctaactgccagtcgccttctactccacgtttctacatttgtcgttttagctcagcaatatgcgacagtgatactggtatgagataacagtctaggttgggctggaaggttaggaccagcagtagagtctgttataaatttaatttccagcccttgccccctcccattctgatttagcaagtcttgtgaacctctttggaaactttatgcacacactgagcaaacaatgtattttttgagaccttagaatttgaaattttttttgttacttttattcttgaacaaccacttgactgggtataaaaatcttgggtcaaattctgtttgtctaaaaattctgaaaattgcccaattgctgtttaacacttttttttttttttttttttttttttttttttttttgagacggagtctcgctctgtcgcccaggctggagtgcagtggcgcgatctcggcttactgcaagctccgcctcccgggtacacgccattctcctgcctcagcctcccgcgtagctgggactacaggcgcccgccaccacgcccggctaatttttttgtgttttttagtagagacggggtttcactgtgttagccaggatggtctcgatctcctgacctcgtgatcctcccgcctcggcctcccaaagtgctgggattacaggcatgagccaccgtgcccggccaacactttttgttaaatataatgatcttagttacattaacggtaaataaccccatcaacactggtggtttatttttattgcttgattttaatacttgaaatgtgaaaatgaaaagccagatgcttcttggcattggtctctaagaactgatccttcattttaccttttagtctccagtcattttttcatatctcaaaagttcttttctgttatgtcctggcctttgcttatgatcaatgtgatgttttgacttccctttggccaacacattttatccatgggttggatctctgtgatttctactgtgtttctattttctgaagtttcatcttttttttttctccctttctcatattttctctgctttctgaggtgacttcttagttttgtactctgcgccgtggtcggttttcagcggtgctaagtcagcctttcatcagctcagttacaactgtgcttttggccgtgagcctttttatttcatcaacatcccgtctcatctctgcaattatttaataaaagttatataagtattatttagcatagaaggagaatgttttcaaaaaaagtcttctgttcatgatggttaatccttttcagatgagaaattatttttttgagccaatccttttctccctctttccttgtacagattttcccccaccccatgaactttaagttaattttcccttattacctaaacagctccacgttgcgtgcagttagtgtactcctcattcaagtagaaggtagtaaggattccttcccaccactgtgccctaggctgccctttactggctcacgggcgtgggagaacaaagccccacccacgggcgtggagttgtctgtcaactcagtgcactggagggcttcgcactgcctttggcacgtggcggtgcttaataaaatgcttctagaaagtctgcaaaagaaaatccccttgggagtgggtgtgacattcaatgtgtctcaaagcggtgacaaaccagcattttgtaagtaattcccttgcatgatagccaaattattatagcccaggactgactgaatgttttgaccatgaatttcacctgaacagaaatataattcactcttagctattaaaacataataatttgcatttttaaaatgtccttgatgtgttttccttctccatctctcttctgccacctaaacactgatgcttctttttcattcaagagaggttgttgatttagaaaggacaaaccatttatcttaacacttaataaaaggggaactatataaattttgaatcctgaagttgtggggtgtgatatctcactgatcttttttttttttttattgggaggaaaatatagaagtttgtagaaaacagataacactgtgggctgtactcttcattttatcagggctgaagataaagataaaaaataaaatccatcaaagacataaggttatccgatttattctcaatctgctcttagcacaagggttaccctgagctatcacaattcctaggatttttcagagacaaaatcctgccagataactaggtaacttagaaacagtgctttcaatcagagatcaccaaatgaaaagtctcattaacctggcttctccccatgagcccttcctctaaagaggttccaaacaggccacctttataaagagaaagtccatttcccagtcgagattaaaccagtcaagaatcagaatgaaggaatatgtctgaggtaccagctggtttatcttctgcaagaacttcccatcccttcgacccttgggaactgtaaatcaaatggcagactgtgaacattaaaatcacacattgaaaataatgcatctctatttcattcttttttccaggtttgagatttttaagagctctgagactgatacagttttcagaaattttgcagtttctgaatattcttaaaacaaggtaagatgttcttcgtcatatttttttcattccagtcccctatgccaagttgcaaatatcaggtgtgcttgctttcatcacaatgacattattaatagttatattattcacagaaagagtgatctaacacagagagggagagaaaaccagagtagggtttgagttgctctcttctgcagggccagggaactatgtggtgaaaagagagaaatagctgtgcatgcagggaagtagggacacttttagggacacatagctgatatctgtgtgcccagtggggttgcccagataagagccacggtgtcaaggggaaaggtgcacagtgaatgagggatagatttgctcattgattgggaagtccttgctgccagattctaaatcgcccctttattacatcactaaataagaaattgaacccagtcgtaaaggcaatagaagcaatgctgtgagaggcaatcacaaacctcatacggcaaacagaaaatcatttcatttcaaagcacattttagatgttcactttatatccgtatagcccttggggctttctctgtgaattgccttttgggggaaaacctacaaacctcctgccgaatgcaccatgaatacttctgttaactgcgttatgatctggaaaacacaactggaccaggaggaaaagcccccagaggatccctttcctgatgacctgccggcttgcagagctggcctgaaaccaaggctgtcttgatgaataaactaataaaagaggttagacgtgctctaatggagaataagtacaggccataaatttctcttctaggaaattacactctaagaagctaacttctaatgttccatttcctctttggttgcccttcatgcatttgataaatgattaaaaacaggacacctccatattttgtgatttgtaattaatatatctgtagttttgaggattagattcagcatcattttcctggtaacacaggctgggacctagcttcctgaatgaacctgacacagccaacaaattcaacctatgattggctttactccttgggtgttagtgttttttttgcttgtttattttattttgctttaattccaaattggtttcctctctctgactgctcatctatgtgactgtgaggtcaaattcactttctattagtcaagttgaaaagaaaaagagaatccaatggcactgaagtctttaaaagtatgtcctcctgccttttactgttcattatcctgagataagaatttatcagtcctctgtttattagcaataatgtaatattattcacatacagtgaatattgtatttcttcatgtttttctgattgccaataaccttgatttctgccttttaattattcttctatgtgctagaatcatattacttttgaaatgtaaacgatcaatgaagctagcatctcgccaatatttacgtatgtcagattcactccactagactgtgttttaaagatggaacgcgtgagtacccagcaccaagcatagagccttgtccttaagagacacttacttttttggtagggatggtgttttgtgacactctctaacattgggtagtgtctgtctctccctgtttcacaattacatcatatgttagggggatttttattctctgatgccagcattttgagaaggttccattgctctgaggaatactgtctactccctggaccgttttagaacttgagaaaatgatggaccatctgaatatctttttctgactttctgctaggacactcacctctctttcctttggatgcgggaagtggctgtgggatccctggtgtcagctcacctgccaactgcactcagtgctgcctctctcagtgcagagcggggaagctgaagcagccagccaggggacgagggagagaatggccctagggaagagtcacggggtggaaggctgtctgggcatctgccatccgggccccaaaacagcctttttccagcaccccacttcccactatatgaaactcttgttgttagagggtgctttttgccacaaacccacaacctgggttttcagagttcctttcacttatggtcataaccagatggttgagataattcagcaagcctggagtgagcacccattggtatcagcagcaaggtgcatgctaggagtcctgctgtcagagaacttgctgcgtagggggccaggccacctgacggtgtggttaatgctgatgtcagcatgcccaggggttgagaggggagtaactaagctgggcttagcctgagttgcagggcagtcaaggatcttttcgaggagaaggttacttttaggtaagccttgtagaaaaaagtgtcatcctcatggggctgggcatgtgaggggtagggtgggggttgacttctaatcaaggaagatgctaacagcacactggtgtgagagcataacacttggggaaactttgggtaattctgcactcctggacattaagcgttctgtgatggaaagaggaggatgaggttaagagggtaggaaaggccaggtcaccaggcacagaagcaaacgtcatgtaattgtaagaaatctagaagctttaggacaactctctgaggccattctctctccaggtgccagcctggctaatcttggctccttccttttgggcatccccaagtgtggatcccaaagttctgtcccagagaaagtgcagccttggcttttgtagggttttggacttttgagcgattctcctgtgactcttccatactctgctgctttcatagcggtccttccagaagggtgggttgggggacccatgtaatcgtctttagggagattttgtctggctctctttggcggtgaattcctgccaatctgtggcattaggcagggatggaggctttgcaatgcaatttgaaataatgatttggagttgctgtttcatttccagtactttggctgcctcactgggccaagagctgaaagaaataaggcagagaagcataaggtgggcagaaagattgataaagaattaagaatgcagcagaaggaaaattaaagtgcatgggatgaaatgggcaaatcacaattatgtgaccagcatcagggccctttcccaaactgcaagcccatagggggcctagaatactccatagcctgaaacggccaattaaaggggagacaaggagactccctctcactatctgaggttttggcagtttctcagttgccctgcaaactggagatctaacacacaggtgctagaacacttattctactgtcagaggaaagtcagcagctgtgtttaaaggctgtaattccacatctcattgactgtggtaaatattgatgactaaaacatggatcactcagcaattttttccaaaatgggaatttccttattgtttcctctaatttttcttttcttttcttttcttttttttttttttttttttttttttgagatagactcttgctctgttgtccaggctgggcgtgatctcagctcactgcaacctccgtctccagggttcaagccattctcctgcctcagcctcccgagtagctgggattacaggtgcctgccaccacacctggctactttttgtatttttagtagagacagggtttcaccgtgttggccacgctggtctcgaacttttgacctcaggtgatctgcccactttggcctcccaaagtgctgggattacaggtgtgagccactgtgcccagcctgtttcctctaattttgaaaatatgttcatggtaaacattgcaacaacacacaaaatcacataggataaagtaaaattgcctccacatcacactactttgagataatgattacatctactatgtcaccttttgtttctcacatagcattccatgatatgcatgagtcatcgtgtacctaaccaatatggttttgggaggcgtttttgaaactaaaacattactactgacatgaacttagaaatggctccaagataaagtttgtaaagaagagtattctatatggagactgcaagagatgtgcagggagaggccaaatcatgcaggttcttagattcatggactttactgagaacaaatgagagctgttgaaggattttaatcaggagaggaaatgtggttagactgacattttagaaagatccactattccaacagttgtatagagaatggggttgaagcatcaaagacctcatagaccataagaccaattaggaggcagtagtccagggaagaggtattagggcatggccttaggcagtgcaaattggggcagagaaagaagaagggatctagagataattaagggattgaattggcagaatttcactttgttccactcatgttgtcattcagaccatttatgttagtgtggtgcagtccagttaactttttagggggtgggtattttacatctgtccagcaaagagagcagtaaaacaaacaaggccagcagcacctggcagtaccagaaacaaagagaaaaattagagacaagcagaacagggacaaacgtacacttctttgtacaaagtgcatggcattttctgtgttaactgaaacatgtcttgttaaacatatagaggacaaaggaggccccagaagctctgggtttacagctgtaatctctggagccagaccttctcttgcagcatccacagtttcttggaagaggtctctaatctacaagaatcctgtgcctgacctatcatgattcactgtgtccatcgatgtgaattagaactcatgggatggagactcaggaattgtataggcaacatgagaatgattgactttagttggatcaggtgttgatgataagatcataatctccctcaaagcttaggaagcaggctagaatctgaatggttcaaatcattctaaccgctggtagcttcgtgtttggcccagatccctgggcttgaccaggaaggctatgactatctccacacagagatatataacctttgctatgcagagcacacagccctgctcctggcgtgcctcactctttcttcccaaggagccctacttaacctggcaaggttcacatttcagactgtggagaatgcccaccaggggttaaccttgcatcttttgcttgtagctttcagatgtgtggtcatacagtttcatttagaaagcaaattcctaaacctagggatctgtgataatactgatgtcataaaaataatcagatttcagagctaaacatggactgttttagcaacaatgattaaatgttctgcatatggcaagagctccctaacgcactactaatatcactgtaaccatcatttagagtttagtaatcaccatatttaggtcatttttccaaagcaccaaggagactcagactctaaataggtttaatatctcaagaggactctacatggttgttggtgggacactgctgtgttcaggtcccaagaatccaggagtatgtaagtgaagccacttggtatttaacgataccctgagaaaatgaacaacacacacctccctaagaggcctccctttgtcgccggctatcagttcttcatctatttcttaccctccaatgtgggagcacaccttagaggacttacaaggtacaggcaggagagaattctgcttaacacaacatctaacacataataagggctcaataaatattggcaattattataatctggtaactctagaaatgaccaagagagacagaatggacattttggctgtttttccaagttttcgagccagaagaaagttgttccacacattttgaaatatcagtctcacccacaaagttgaatctgtttattctttccatgaactgtcagaatcaactctggaaaaactaagactatggattcctctgtgctcttccatagaagaagaaagattgttgttatgagcattaaatgacttagtatacataaagcacaggtgatcctaaagcacttaggatggtggcacatgtggtgagcactgggaaagaactgtaaacaagctagctgaaactattactgtgatcttaaatgcctagaatttaaatcattggttctccaaaagagaggtaagagagggcagtcataacagagatgaactgaccaaaactaatgggttgggcaaccctgtaggctgcattaagccactactgggaaaatgcaagagctagaaaagagagttcttttctgcaagatgcagcaaggaacacaagagtcaaatagcaacctaaaactttacaaaagacatcttaagtcagtaggatcaattaccaatgaatggctggagttgagagccggggaaagtcactttgtcttgcagatggatggaacgactttaaggaagcagtagggattgaactgggctttgaagaatggggaaatttgactagatgggaagggctttcaagttgagtaaatagtgtaaacaatagctatagtaaataggtttagctggcatggcagtttcaagagtttatgtgaaagaggggtggtgggagagactgggacttcacaaggtgttgacaatggaaggagagagtttgaatgtcatcttttagtcaacaagaagcctttggacagtgaagtgacctgctgacagcagcgttcaggtataccccagtgggactgaacaggatgcagtttagaaagagagcaggggcagataccagtgcactcagtgcagagtcacgggtctgctatgctccagggacccagggctcctggaatccagacagacaaggcctcagctcttagggacctcaaaatgtcataaggtccagttgatccactcaaggaacaccagtgaatgctaaagctattaggtataaggtttttggggagcaggatattcctgcagtctcggggcctcactcaaggtggcatattcattacaaagggaaatgggcacctctcagtggagacattagcatttctgccttagccacatggatggagctagtcattgggctgggatatcctgatgtgatgccatccccgaagagattcttaacagaaatacttaagtagggagctatgtaggatgatcaagtctagaggtctaatgtacaacatgaggactattgctaataaaattgtatggtatttgggatttttgttaaatatgtagattttagctgctcttgtcacacacaaaaacgtaactatgtgagatggtaggtaatatcatgttgtaaacctcaaacatacacaataacatttatttaaaaaataaactgggctgggcgcggtggatcacacctgtaatcctagcactttgggaggccaaggcgggcagatcacctgaggtcaagagttcgagatcagcctggccaacatggtgaaactccatctctactaaaaatacaaaaattagctgggcgtggtggcgggtgcctgtaatcccagctactcgggaggctaaggcaggagaattgcttgaacctggcaggcagaggttgcagtgagccaagaccgtgccactgcactccagcctgggtgacagagtcagacctcgtctcaaaaaataaaaaataaaataaaaataaataagtaaataaacaggatccagaatatagaacattatagaagacaacctaggttcacacaaaatttaatgtcattacaaaggagtggtgtcaattatacattagaagggactgaagctgggattggcaaactatagcccatgccggctgcctgtttttgtaaataaagttttattggaacaaagccatatctattcctgtacatgatgtccaaaagctgctctgaagccacagtgacagagttgagtatttgtgacaatgtctatatggcctgtaaagcctaaaatatttactctctgtccttgtttcctgacagttggatttaagccacctaacagccaaatgcagtgcatgaaacttgggtctggggggaaaataaaaaaaaatcaataaacataattttggggcaactggagatatttaaataaggtctgcatattaaatagcattactgaatttttatgttttaattttctgaggcgtgcaatggtattgtgattatgctgtgcaatgcccttcttcttaggagttgggtgctaaagtatttagggcttgtgccatgatgtctctgatttattggtaaatggtttagcaaatatatatatatatatatgtacatggcaagaagaagagaagaaaaaagggcgggggggataagagaaaaagcatgtagggagataaagcacccgtggtaaaatgttaataattggtcagtctaaatgaagagcgtacaagtgttcattatactgttctttccacttttctgtagatttgaagagttttttaaataaaagttaatttttaccaaagttaaatttgttcctctaggctctgtcctgaccttcatcccagcagcttcctccaccttccagaattcccttataatggagaaatggttgggagttagatgtggcagcctctcctgctaagcgggtgctgttaccctgtaaggcagccccagcagggccttcccttggtaacgtggggattttgcttgttgtctcttgcacagtaattccatcaagctggtgaatctgctctccatatttatcagcacgtggctgactgcagccgggttcatccatttggtgagtaaccttgaagacccttctgctctcgcttgcctgcaacaagaccctctctgagtcattttattacctaaaatttatcttgctggaaattaacttcacctcggttgtagacaggaagatgggaagcaaccacacaattgtctgggtttccaacctttttaccccaaactagttccaaatggtgagtaatgtttgcactattaacctgcatttttcagttcattgctcattggtattgtcatgggggctttggtagattttccttctgtctgcaataactatagtaagccacaagatggcagtgcttcctaagcaaacacctggaaaaggtctggggacaaggttggaagttggacccacacctcctagtaaacaacaaattcagatccctcaatttctttccacttccgccttacgaaaagccacctttgattattttgtctgatttgtacctcaaaaatgttcattctttttcattagtgactctttgaaagccttgtattaagtcaagcccctcacaccacccgaaggcagactttccccctgcttttagagagcacagccattgtgggaagtgtgtttcatgcaaacatagactgttacaactggaaggagcctcgtctagctctgagactttggataaagttgaccaccagtggctgagcctctatttgcataagggatagaaggacgcgcttagctacccacacttgggatttaggtaattatcacccaaaggaagacaggcctgggatggcagtggttggggcatggggcctcacgtagtcaccagatctagagtctcctgcccagcccttaatgctgatgggattcatggccaaaatcaaccttaatcaccctaattcttgctgtaaccaagcacgaagcacccaaatcacatatgtggaggagatagttgtctttaataagatgatgaccccaccttactacgggtattagtgaagtcccttcaggttcaccaggaaacttttgtgaaaatggcacattgaggacaaactgatgtgtgaaagaggccaggccctggaaacattttgcagaggcagaggtggaggcctgggggccaccgtctacaggccctgtgggtggatcacaggcatatttgagtaaaattgggcccgcagctccctctctcctgagagtatctaaagtacctttcctgcccacctactagccttgttggcagatcaaatatgatggaaggacaggaaagtggggaaactgcagtctcgggccaaagctctccaaatccagccacacccatttgttgaagttttgcctctgcagagttgaacaggacctgtgtcgcccacaaaactgaaaaagtttgccagcccttgatctaacgggctgtgccagtgcaagctgttctcatgagctcactttccatgcccctgtgaagattccagcagcctcaaggctgggaccaccattgccaatttgcaaaggagggagagcagggccagattccagagatgctgtttgaatcagaaataagcagggcccatatatactctttggataaactgatggaaggaggcagccccctacggaagtgtttagaatttctgtgggagaggcagatccaggccatctgggccttagaaacccattgaggaaggtcagggacggaatctctggctctttccttgaagagagtgctctaaaacctggccagaggcaatgccctgaattttagctggcttcccacattttaccagaagaagagaaaaggcctagagatatttcccttcttgctttccctctctgtctcaatcagccaggaagacatctcctgcagctgcttctccactttctctgtgtcctgctcaggagctctgcatcctgactcacagaactcagcccgggaaccacacatctcgtgtggagagtggtgtgcagtagcaagtggccttcgagagtgccgagcttccgcgtttattgcatgtatacacttcaatagcatgtttttcttttttctcccctgtcccatttgctttaggtggagaattcaggggacccatgggaaaatttccaaaacaaccaggctctcacctactgggaatgtgtctatttactcatggtcacaatgtccaccgttggttatggggatgtttatgcaaaaaccacacttgggcgcctcttcatggtcttcttcatcctcgggggactggtaaaaaaaaatctttattatgatgttgattttgatggctgttaatattttccatgatacatttccttaaagctttgtattttagactgtattctgcactagaagcaagccttaacgttacaatcaggctaagtaaatccaaacacgatggtgacttttctgcataattcttggtgtattacacttgtcccatagatccaggcacattgcccttgtcggggacagccatttagccaggagcaaacctaattgtcttaagaaaagtgatgctgttaataagggagagtgtctaccccttagcaatgtaactcagcatctggtatgctacaaggacagtggctgtcacctgcctctggtagaagctgtcgatactttgtagagacagtttgcggtttcaagagctctcccttcccctttatgttcctcccctaacttccaacaaacactgtggctggggcctgccctaaagagaagggtccctacatcaaaggagagagagcaccttagtcttgtccaggcggacatccccatgtgagcagagtgcagttttgcaaacagctcactccattctgcagcggacacatggggtatttttgctcctttcttctaagaaagtttcactgtttgctttttaaaagtctacgcagctctttatgttgcactaaaccaccccttctaatgtaaatcgaggggatttctggccacacgttggcagttgctgcattttgtctttcaaagtagctcattttaagtttagatttttttttgccatttatgaagcgagtgattaaaatcctaatccatacacagctttcatgtatgtacaccgtgcgcacatttatatgtagtgatgcatacacctctctctgttttgtatgcatagggcctatacattttaaaaatgtatataaatgtgcacatgcatgtgtacattcacgcaagcatttctacagcatccgtgaggtgcctatagataaaaagacccatccagccagccacaggccagatgtttgttggacaaaacatggcagatttgtgtttctccttgctatcttctcctcccaggtgatttcctaaatttcccttttgagcttttcagtgtttttttttttttaatagaaaaatgtagtttttaatcttttggtgtttattttcttttgtcactcataaaagcattgattctcctctgaattttaatgacaaaggaagatcttctcttgcgaaactgtgtgtgtctgtgcatgcacacatgtgtctgtgtgtgtttagtttcactagcatgtccccctcttgcctatttttcttcagcaagaagaactagatatcaccttatttattcctgtcgcctttgtatttttctcgactgtgatttttttttgttctttagttgtcaaggtggccaatgtttgtttgtcttgtgtatttctgggagcttgctctcttcgtgcttttagttttttatgatccaacatatcaatatatacctttgcaggcctaatccttttgtgttttcagatcttagtgcccccaccctctgaacaggtccccccttttctttggcctgtctttttagtctctcttctgtctcctatcttctcaggccatgtttgccagctacgtccctgaaatcatagagttaataggaaaccgcaagaaatacgggggctcctatagtgcggttagtggaagaaagtaagtatgccaagaggttttgctgcctctgctgcggtagaatcctctctgcatgccatttttttttttttttggctcttgtttctttgtttcatgcatgtaggcaatgtttgcccgctacgtgcccgaaattgctgctctcatcctgagtcggaataaattcggcgggacttttaacaaacatggaggcagaaagtaagtcagttgcatcagaaaagatgtggttgagtgactttcaggagtccctgtggaggtgccatctgaattctgcccctccccaaccccaccgggtgcttctgtgagggaaggcccagtttctgcatggggtgtgatgtcagaggtgacccgaggacgttgccacgcttggaccaactcccattcacaaattccaagagatgtaatgaatttatcctgaaaggagtccatttataactgggcccatattttctcttctgacccctaacaagtaaacaaaactcgttcattcttccatcatctggctatgtgataaaattctggtccctcaaactagtatgatgccctcctatggtggtttgtgtgtagcaagaacacaggataagactctggcagagaagtccttgggtggcagatccaggtcatctggcctactgcaaaggcactgcggccactgggaacccagttctcctcttcatccaggaggcaccgatcttatcctcaaagggactcattactcagctgaaattccttccgggcaagaaatagtatatttctggtagtttagggtactacatgctattcctgccaaatcttttgtttggcttcccaaatgtgaatgctttcttctcgggaactattttagtgtgtgctcagatcactttatcactctcgatatcaatgtgcaggttcaatagagaccccaaggttttttcctaagtagagggcagtaccttacaacctcaagaggagaatgccatgggggagagggggctggcagcagccatcctttatttatttttttaaagctttttctggagtagtcacctttgtttgtttttggttttgaggtataacttacatagagttaaatgtacacatctttaacatataaagtgaggaacttgtacctatgtacacacccagtcactatcatcctaccatccggatcaggacacagaaaactttcatcactcatgcctcttcccagtcatggacgttcctatcatggaactgttttgttttgttttgttttcccttctcgttctgtttcaaatgaactcttaaagagcttcttttgtttttttaagaggaaataaaatcagactgggagcattgtatttccctccactgctgccttctctttttgacagtcagccgtgtgggacagagtggaccctcccctttggtcagtgagtccagtgcttcctgagctcaggtgtccaggcctctgcacaggaaatgaggaggtggacaaaagggctcattttcttgaactacccacaggacacccgtttcctttcaaaggcacaaaggacagtgggccagaggaggccagttggcgtcttttccgggaggcagcacatccctccatcttccctctaatggagccctcccctcaatattatcttaacagccctggatgaggttagaaccaagctgttctgatttctgggccattggttggatccaaaaggccaagtaagtccaaagattcccagtggtcatgtatcccatgccaagaggaaaacagcatctcaattcattttgccttgaaggtgtggacaggtctccataaagcagaaggcattctgagggcctggggctctctttatggcctccctatcttctgacgtctccgccagcatttcccaatcactgccccaagaagtcaataaaatcaattgccctgaaggctaagttgaaaatatttcttgactttcattccaggtgattttttttttttaatgaaataattttcctagtcaaatgtgggtgagctggtgggtgggctggaggccggcagctttcggtgccagctgacccagatggggctctcagcccggcactcactcactgcccccagtccgatccggtcatctttcaccctggcagttccactcaaactttcaggtgctgatgacttcagatcacagacttcctgccactctgttctggctctgtaatcttttatcaccgcttttagcctggttttctctctctctctctctttctcttttttttcttctccgtttatgaaaatgcactttgcttttaatgttctttttgggtccccactgttcctgaccctgcagacacagagtccgtcctgtcatcagcaccgggcctgttcactactttatgcattgtttcctggttcaaaagctaattactaagtagtttaaagaaggcctttggtcacttagatctttcatcagaaaatataagcttgggaaaggcacggtaataaagggccattagcaccctttgtttgatgttgtttttccagtcagtaaaacaagattgatgaaatgttatgtttggccaaattttgagttttcatttggaattcagtgttgagagaatgggctgtcagaatcaataagttttctttcgcttgggatatgggcatgtggtagtaattagcaatataaggtctttagttgagcaaccaagcatggattctggcagcaaacataatgagaaactacagttgttctatttctaacgtcaaaaagtttccagataaaattaaatgcatttgcaaaaggaaagcagctaaactttgttgaaagataaagttcagactcttaaaacagtgtgctgtgctctgagtttttgtgtatgcataagtccatgtgctctgcccatggacacacacatacatgttctctgctccccaggacccaatcaaataaatgcccagaaagaaattagaatgtatacatagttaagggatttgtttacttgtgcatattttattcagaaatgatttctctaacaatatattaacttgtcagagaactcaaggtaactcatgatctaaagctacagagacataaaactttgaaattcaaagattatttaaagtacaaaatttaggcagagaagatcagggttttgtttgtacaacacccaaattcaggatatttgagaatatgaagatttcattggcatttcattttcagttttaatcaatgtgtttggcataatataaacatttcaagtagcattctcaaagcctcttcaccatcaacactatttcaagggcctagagtgccttacccaacattttcatcacctcctgaaggatacccagtccctgcagtaggtatgggtaattgtgcacatgtgcgtgtgtgttggctatttcatgtatgttatgatggattggagcatctaagaataggggtttgggtgtccacaaccaagggttcagtgagtagctgaggcaggtaatctctctgagttggagggattagagctctctgggctcttgggctgataccctaaatcttattcataagggagccctcctgcagcccagcctgcctcccaaggccactgcctcctcctcctttcctttgtgtaaggtcaaagctgcttagagacagggaaggcctgagggctggtgacgctcccatggcctttgggatccccagctctctcctccctctcacagccccttgcagtttcccccagaggtctcctccctgagtgtgattcattccactcctggttagtttatgagaactgacaagatcgtggtccaaggtcacatggccaagggccatggaaaataatcagtcacagagaggaatccatctgctgtaacccccttgttagagggagtccagccgggagccacccagaccttgtgtttcccatgttgggacttgagtgactcaagtttgaggcaatcctaggcccaggtgtttgggacagagagaatgggatgggtttggattattctactgattcctggtagccaaatgctgacagggcacacgagaggggaatgagtcatgaaagactagatgtagccaaggtgggagaggaaagtgagtgtaattaacttgaaggaaggtcctcaggatgaagctgctgagccgccattctggtttggggaatagttgtcatggactaacccgtctcttgctccaattcaagaaagctgcctgtgaaacttaaatgctgtggcttctcttggaacatttgcctatagagacaggagtgccacacacttcctgaaatgagaatgtgaatcagtgcagcctaaagccccaggactgccttctctggcaatagtaatacctacaaatatttgcatatttcagaatcctcacattgatcctgtgagaaaggtattaccatcatctccatttggaatgagtgaagaaactgaggaacagggaggttaagtaacttgcctgacatcacgcagctagtaaagagttgggctggggtttgaacctggacagcctgcttccctgcgtcctgctgcctctccatgtcatctcttgagactccattctgctctaaactcagtgatctcctattgtttgtatcttcctccacctttccgtataaggggagccagagtaccgtgctcatgatggagaggaagagaaaggcatgagcttcactttggggctgtctcctctcccctcctgcccacccactacccctaagggtcctggccccaggattgaggggaaaaagatggagaggggacaaaaccattccttcctttatttttcccatttggttagactagaattctaattccctcttgaacacttctagcaatgaaaggctctcaaggacagacagatgaaccacacctaaagtgagaattgtgccttttttgtggatttcaacattttcttccccttcctggctccatcctttaaaggtagttccatggagaattgtagtgatctgctaaacttggacttccctgctgggcagatctcacctgcagagccttctatacccttgcagatggaaccacctgttccctttcactccttagttagtctgccgcacagcacagagcagtatctggaggtggtttcttccttatcagtgaaaggcacagtagagccccacgtgaccagttctgcagggtgcattctgtgtgtttgtttcatagctttgacttggaatattcaccctcaggagcctgtatcccgctggagggagttagggctgtctgccttcaacctcggatgtggtctccacattggaaagagccttacattcagagagatggggacagtttgtcatgcttttctatttaaatatgaaactagagtacttaattatcttctttattgtaaatgctcatattttaaagaggattccatactttagaagaaataattgagtattcaatagttgagaacaaaattcaagaactaaaaacagcccagcacagttagtgacctgcctcactgtccattcctgtggcccctctccatcggttcattcactcactcggcaggcaggcattctctgtgttatgcatcaggcatgatgctgggttttgttgggtgctcagggttcattggcgaacaaactaccctcggaacctgtcctcctggagtttacagtctcaaggaggttgcaagcactgagcaagggtacaactaaagcaaatgccaattacacatttttaatgtgtgctgcaaaaccagaaaagactaagattctgcaactgagaaaaacagggattagttacactggataaagtagtccaaggaagcgacacctcagaggaggagatgctaactaacgcttgttcaatgaccttgacccagcttgcattacccactaagctgggggagctaacactcttgcttttaaaatccaggttatgcaagccccacttgcaaacataggtcttcagttctacctccactagaggaagtcttaaaaactgattgctcgctcagaccccaacctgcctgagcagtgcttgcttgacttatcgggagatggcatcctgcgtatcttccctgcttcctgattattgggttatttttaaactctgtgtctttccttatatcagaatttggactctccttctcactcagaacctttgttccttcctgagagcgcacactattccctcctgcctggctgtcttgtatcaacgtggaattccactccatttcctccaccacactcatgtcttgtccaccagggttctagactgatttctaaaggatttggaattttaaattgtctagtgtgccagagcatggatcatttatttacaaagactcatttaatctatggccccatagcctaccctaccttaaaggaattaacacgagtcatgccttcatgtccatccattccacatgtgtttactgagggcttgctaccaggcactggggacagatgcatttctacacatccataaaaatctccaactataccacagcttttctgagctacacatcgtactatttggccacctaagtggttgggaagtccaatatcagggcttattgaaacctcttctcttggttctgagagagtcttgctacaacaccatttccctctcgactctttctgggaaggcatggcctctagcacttgggaatcggatttgagatgatttcatgttatactgacttgggccgatccacaggccttttctttccatgtttacttgtgtcttgggcaacagctattctcacttttcctcgcctgcaaggggcggactgctctcatgaggggtgtttcctataaaatgtcatttacgatttctctattgcagacatggctctggtcgaaatgtgactgaagctttgcatcctacacagacttagatccctcatcaagtagccattcagccctcattgcatgagccacgtgacttccccagcctgaacccctcagcaatgtctttggattcctagattttaaaagccataaattagcaaatcatcaacatatcaccaggaaggatcatctggtagcgattctagtcagaaggaaacacaggccccaataaccgatctttataaagatatgaagaactgtagacagacagatacagtaaataagaagacaaatagataattcaagttgacagaacatcttggactgattaggcattctgctttgattagcattaaacttcttgggaacagggaaaacaaaaaatgagcttgccctaatactttggaaaaatgacctcttgactacttctgaaacgtggtgctgaggggtagatacccaaagcgcttgtcattagatgccatgtcttctgatgtgatgtgctaggtatcccttcctgatgagaggggtcttggtgggcgtgggacatgggcacttctttcttggcatctgttttggattcctctaagccatatcttcagtccctttcaaacttgaagctctatttaaagagacttggaagcatattaaatcaatttcctgataatactgatagaatgaagctcccctcctttcctgctgtcactcttcccttccacacacttagcaaaatgttccagctattgttctgaaaacaagaatagaaatgtaggtgggagatgaactgtgtaccttaaaaaaaaagtcgtattcaagcctagattttcactctcaaatattctttcttccattaaaaaataattcgaatatgatttctcaaattataattgctgaagattctgatcaatggctcctttgattgggtgaatccttgccgggtagattcagaatctcaggaacaattgcagccatccagactaggttgccccctgttttctgtcttcgtaccatgtcattcactctgctggacttctttccagagctgtgcaaaatggttcctggtagctttggggttccttccatgctgctgtcatcatactatgaaactaaaccaggaaactttctaactggccaagtccagtgtctctttttattaaaacattatagaggtcaatacattgtgagagttgtggaaatctgattctcttgtcccaagggttccagtctccacagccagtactggtgttgcatcacaatggcctgctgtcacccccagaaccacagggactgttccaaatatgggtaccagttgctggaaaagtaatctatctcccctccttgtacctttctaacaagaggacatgggggcagttcagagatagatatgtgcccatctcagtgggagcttatatgaccttagccattgactccaaaggcaaatgtcagctagtgtatagaacagccttaggaaaactcccattctaacatattggctcaacaaacaataatttgaatccccaccatgtgctgtgggtaaaatgtggttcttgctctcctggagcttatctgagattctgaccaatcagtaccacccaaggaaacagtggcagtgaaacagaagcttgagtatgcaggagcgtcttcccagtgaaatgctcttttttcaggaattttattcattgaaatcatggaagtgtacaataatcatgaaagcaagagacattagagggaagcctcccaaaagcatttgataattcacgttgttgaacatacccattgaacagtggagagcataggtaatagcagattgccttgttcacctaaaagcttacagacccagtaaaagaggggtgcagaaagatttgggagggttgggaatccgctgatgtgatcctgaggtccactcctttccagaccccacaaaggtcctgctgtggcctgtcatgcctcgtatcatgccttctttttacttttttccttttctttttttttttttttgagatggagttttgctcttgttgcccaggctggagtgcaatggcgcaatcttggctcaccacaacctccacctcccagattcaagcaattctcctgcctcagcccctcgagtagctgggattacaggcgtacgccaccatgcccagctaattttgtatttttagtagagacggggtttctctatgttggtcaggctggtctcgaactcctgaccgcaggtgatccgccagccttctaacctgtagctccttccagtccctgtgtgactaacagatgctggaggtctgctggggcctatgcaagtatgttgagtctacagagtgaatggctagcagcttatgctagctgtggcaacaccgttgggtgtggctggagaacaaggcaaagatatgtcaagttggttgtcattatgggagggtcagtcccaacagtatgtgctcaaggaccatgatacatgattcaccaggggtgttagggagggaggtggggctcgctttgtaaatcaaaaccctctcctgggcaaaattcagagccatttctttgcttggactcattctccctctattccaccttcatccctgaagagtgaggctgacctttgcctgccttagtcttctctcagtctctgcttgtacagaagcagcattaaaaatgaaatcgggcaaatctgctttgatctgaaaaaaggaaagtgccattcagctccctgatttctctgtaagagcagagaaccatctagcattgggagattcaggtcaagggaagacttgcttattttaaaatggccaaaggccaccaagcccaaagtaatgggatgaataagatgcagaggggtgagggtgttggggagggaggcataggaggaatcagtgcagtttgtgagggttcagcaactgtggaattgcttactgaagaaagctgcagaattccccttccagagaggaaggaaggaaagaaaggaaaggagagagaaagaaacctaaatggtggtaatacttgcatactaggtaacagtgagaattaggtgagaaaccaaagtaaaggtaaacaagtctaccagttaggattctctggttgcaggcaacagaaacttatttttttgctgacttaagaagaaaagttttttgttttttttttttaaaggttagggtaccttagagattccaatgaaaaactgaagagcaagatcccagaaaggacagaaaagaaccagagatgcagctctgacactgaggaagtggaaactcgggagtagtcattacagggttttgtcatcaggttgaatcaactcccactgtgattagcatcagcccatccaagatttaagagtacccattggcctcacttgggcagaaaaccttcactaaaggtcccaagactgtatataattgggagactgtatttaatttggggaggagcaattccccaaattaaaatgaggtgctgtccacagaagagagggtgtatgcaggacaggcaaaatctaccaatgtccccggcactgagtttctcagaatttaaagacttggactgaggctccatgtaggctacaagctacaaaatatgtgtgatcatttctcaccacggtctaattatggaggtctaactgtgatttgggatggtggaggtgtagacacagatccctctagggtagctgaggttctgactgtctgcatgcgataagatgcaaagttttggcccaggtgggacatcccggtattccccactggggctgccagttgtctgtcctctgaccttggggctctgctttagaggtgcctttgctgcactgttgggatctatttgctcagacttctgccccatttagggaaacagcagcacagcctgccacatccagaacagctccattgacagctggagaagaagattactttattcacttcctcactaggagggagaatgcatttccttcctttgtgattagcaaagtactagatgtgtccatggataggaaattatcttattgctgaacctccttttttttaaaaaaattattttaacaggaaatggtgatagtcagggtttggggttgtgggactgatacacactctcatttgctttgtttttatttttctttatgtgtacagatcccttacaaacttgaaatatgctagtagattcagggtggtggaataagcctatggtctaaaaggcttgcagtgaactacctgttaacttttttctgcacttaccatgggatagagtctccaagatgcatactttgtcaaccaatccatcagttaacaaatagttcctgaaagcccagcaagttttgggggttccaagccaggtcctggggtagggtggagggatgaggcagcacagcctggagttaggcttcatttgcccatgatgtctcccctatctttactgaagtcagtctctttgagacattcagtaaaggaggaagtgggaaggtgggagttggattagtcttattttttggcagtgggggattgagcctcaagggaagcgctgggaaacagtaaccctgaaggacatgccccaaatcagggaaacctgcattaagactaagtagccaagaaaagcactaccaggtgagaaggaaaggaaaggccagcttgcaggagtgtcatggagaggtggtgatgcagacaccaagggttcaaggtcaacctaggggggcaaacgtgaagctttggtgctgaccactgtgtggtttaggtcgttgggtctctaaccccccacgccctgcttcctgtatgatacagtgctgctggttctcttgagaagtacttcttaaaattcattcccatcatgtcaggggctaccaatggtgagatgcattttgggaggagcaggacgaggaaaacacaattagaaggctcagcagaaagacagagagtctagcatatgtatttgatataaatattatagttttacagagacatctagatcaatatgtgccacatttcatctacctctttgacaaagtgagcacaatgtattcaggcaaagctgtataggattttcaatttactctgtctgatttattgtgacaagatagctctgggttttttaagttctttatactcgttccagtaaaaatggatatagtatctttaaaaataaacagcccagagctgtgcattttacattgtcttcctagagcgaggctctgctaaagaaagatctaaggcctccccgccctcgcagaacctgatcgcagtaggatttgctgccatcccttctctttggcttttttgagggagtgtgggaatggttgggggcagtggggacagtaaatagggaaatcagttaggaagcgattgcagatgtctagataaggtatgatggaggtgtgaactaaggtcggacagagaactggagccctgtgtgaggattcatcagtgtctggtgggtgcagcccagtcagcctgggcctcttcattttagtgactggccccaggtcactgagaactcgccccccagtctcccaattcccagcttaggttatcctccctggcaccagctgctttctttcatcagaaggcatgaaactgagggaggtgttgtgctctggatctggcactcatcttgcaacctgtttccacatcaaagagaagaaaggtgctagattaaacaattgccaagggctattcattcagatgctgagataaacttaagaacgtgggagggggcccaatggtgactattccatggtcacagtttcccttttcaaaggctactggctctaacaaccagtatctgaggcttgggaaaagtatgtagattttccttgtcatagacctaaaagtcatcttcagtggctctcttgatgcctcagtcactgccctcctgtcctcttctgccttctgccttaagtcacttcccctaggttgtcctgtgtacctgtggaattgagctctgaaactgaagttctggctcaacttgggcatgcaggctttcctggcccatcactgagaagagagtagaaggattgagaagaatttgtgggatttcattctggaggcagcgatgcttaaatggcaggagaagcacacccatgtatatttagtgaagatatgcacatgaaataagcaactggcgaatttatggtgaccctcaatagtgttcataatcatcaaacttcttctcatgaagtcattcttacccctccaatgccgtgacccaccgcactgcccttttcagttaaaccagcccatatttatggagccctgacccagcaccaggcactacttgctcacactggatgaataattcctctccagaaagtgccgttggatactattttggcattgaagatgcttccttgtgtttctgaggtggatcttttattctaagccatgacctgtcagcttatatctattttatgttacctttgcccaagaaatatttgtttacagatccagacctagcatttaaaaccaaaaacttcatcagatcagaaatggttattgattgaggactattggtcatcttcacaaattgagtggtcaggccctatagaaattggtcaggacaatcgctgatggtctaagaaagttcagatccacatccacagatggggagagatttagctactctcatagctgaactttcctaaatattccccattgtaaatggatcattaagattcttattatcttctagattccaggctggtgaggaagtcctgagctgtacatgacatgtctaaaatagacatttggggtagggcgcggtggctcatgcctgtaatctcagcactttgggggccaaggtgagcagatcacttgaggttgggagttcatgaccagcctgggcaacatagcaagaacctatctctacaaaaaccaaaagaaaattagccagctgtggtggcatgcctatagtcccagctacccaggaagttaagacaggaggatcgcttcagcctgggagttcaaggctgcaattacctctgattgagccactgtactccagcctgggcaacagagcaataccctgtctctaaaaaataaataaaatataatataaaataaaatggacatttgcatcactttgcagccccttagcttgctccaatcatatggcttcagttaagtttggcttagagttcctgaccggtggaacttatgatttctgcctgtaatcagactttgctaagactatcatgatactgcctatccagccagactctagtgatcttgcaaaactgtgatggtttatccactccagttcccagactaaacctctcccttggccagtggaggacccctccaacaccccctccaccatgtatccaggaggacctctgtgggtccatttctgcttgccctgaaggagcagaagctgagatatacaagcctctttcctttccaccaccaccttcatcttagtgggaactgaagtgggagacccagattgcatcctgggcaagtcacttttacttgctgtgggatgccaggcatatatgacttaaggaaagagtttcagagaggttacctgaaaagactcaggcagtgagaacacagggttgttgaaggattaggtgggattgcataggccacagaatactttatattggttacatcctaatttacagataccatatggcacttaccatttcatagtgcttaccatggagcagattacttggcccttccatgtatcatctccttagatatcaggataacttcatgaatcaggcaccagctctggcccctcaaaggctctggctttttaattgtaaaatgcaaaattggtacattgtccaagactatttagttatttagtgtctgagctgagttaacacagggctatcagagtatgaatctcacatggtagatatgtaggcatcatggaacccaacagagataactttggatggggatcttttttggcattcttcaaatcatgccctgtgaacaaccattactctgcctccaatgaggtcacaccctgctgtctatcttaacatatttgtgttgatatctctaataattgaggatgcaataaattctagttctcttcttcctgcaataatatccttccccaaactatggccctagaatcttcaaaagtcttgaaaatatttctggtaaataaatgttccccattcaccatccatccctcatgctcttgcagggccctcctcagacacaggctggcggaagcagatctcctaataccgattgctgagttagaggcagcttctccccatccatcaattctaactgcattcaaacattttcaatatgtgggctccttgataactttcactgtatggaaaacaaaatggagggaaatgattattggcacaaaagggggaggccataaatcttcaaatcagatataggacagattggaacaatatgggttctccaaggttgccatgataatgtacctaataactctccttgggcaaaaaggcaatctgctttcaatcaatctcgctttttttctgagcaaaaataccaattacgttgaaggaaggttttttttcttccttttttgataaagacagctctccaccccagaaatcatgctgtggctaaaagatatatattttcaattgtctagaatggtattggatagctagcaccaaatgaaaaaagtcaatcctttttttctcctcactcttgccagcatttgtctacttcttaagagaagtgaaagttaattaaaggcttaagggataatattgattgcattggaatatattttatatgtacccagtacattttcaaggaagagaaccctgactttttctaaggctgaataaatcagccagctgagcttttgattcaagggtgagaggggggaactcatcttttccccttgcacttctcacacatctttcctagggatgaatgatttcagagaggaggaggagatgctggctgatgttcattcagttctttgcatgctgggtaggaagaacgaatgttcaggcatttccccagacctatcattgatttgagcctagctttgagtaataaccaggcttatgctggtatagaacttcgaactttacaatgcctggcacaggaggccggctgggtggtattaacctctcagcttcctcctgcactgaatgggaataaatactttgcccacacccttggtcgcagagcagggaatcacatctggcttactttcacatctaagtgatgagaacagcctcagccacgtatctgtcctgtggagatacccacgcattggattcatgttggctttgctcctaatcttggaagtctatgtgcagaggatgttagaatggcaaagtagccctattgtcagttgcaaggaagttaggtcagtaggggaattctgtttctcattcacttcaaacatatttggcaaattcaaagtctgaaatcttattcagaacgtgcaaatttatttgaagtattttgtccatgtaaatgtacatgtgccacaagaaacattttaaaatatatgataaaatgcatatcatccaaatgttcaatctatattgtgtattctgatacactgtgtgtcacactgtcttagcctcatactactcaccatatactaatgagggggttagtcatatgggctttgggcataaaatttgggtgggtggctaagggaccttcatcaacctagcaggagagcaaagtgatcatgttaagacatctcttctgaagtagctcattgacactcttccctcaccttggtggccgctgcgtgcctgattgctaagtgcaccaccgtaacaataacagtctataatggtgatattattaactgcatcgtgcatattattgatttactctttgttctgcatcattatcctttcaccaatgagtttactgcattattctcacatacttagtcaagcaccaaattacaacgaaagggcaggctcttataatggcatctaatggaacattgcataagccatcatcactgcctcctattatgagccacctccagccaatgagctttctgccttagtggaatgtgcacagagcaattatgaagtgcaagggacatggccattctaaattttacccaggaaattaccatgctgcatgttcaccacctgcccaagtctcagagcgcagctagagactcagatgctgtcactatgagcctggggggcacagggacaggagtcgagcctcttgctacatacagtctcttcactagaagccagtggttttatctccacagtcagtccctggctttttgtcttgtggctgactcttgcatcaaatgctcactcctgactgggcattatgtggcacatataagtggccatgacattgcctggtgccaaagtcagattggccaggagccccgagcggttggagggactgtcagtctcaacagttgtggggctcatctcttccgggtgagccactacttccagaaacagaagtccaaaccaccctcaaacaaggcgagcaattccagcctcatcccttcccagcatctccccatcttgaggtaaattcctttagctctcctggaaatcccgggcaccctaaggaagcagccctctggggacgcacagccagctggcatgatcttccattccataggcatcccagccccatttagccctgagtaatgctcacttactgtaaagtgttacatgcccccattgtcggaggagttatagtggaaaaatgcaaaatttcctttttactgcttatggccagcagaacctataacgtgtcaggccgcacattagccaccctgataaaagtctgctttcttacacacaaaatcatcgtttcagcaagatttgttatctcattacctgataagctctatgtcataaaccaagactcatacagtaaatctccccggaggacgctttgtgggcagaaagggagagatatgaatctgcaagggacttgataatgcagcatttaagcacaagcataatgtcacttattgttaaatgcataaaaccacttggccaaacagttgggcttttaataggattttgtgcagcatcaggtgagaagccatatggcttttctgtctaggagtctcagcacctgctagcaccgctgctttgcctcactgccctctggggatgggagctgggcttttatggaggcggagggaggagatgaatgcttcccctgcagctgcctggcttctgctgtcttgccagggggtgggatgcagggtcctgtcgtggtgcctggcctgatctaactggcctctcctgttcaggcacattgtggtctgcggacacatcactctggagagtgtttccaacttcctgaaggactttctgcacaaggaccgggatgacgtcaatgtggagatcgtttttcttcacaagtaagagcttcctactgctgtcagaccctctgcccaaccacacaccctgcgagggactccctgaatgtctgtaagagtggaggtcttggggaatggcactggggatggggccagagttgggtaagccatgatcccttttggcctcgttggagaagatattgcagaaccaatggaaagggaagcaacacactggttcaatgatgagagcagagtctgcctctgtggaggcgattctgggaccacatccgagtttatctctggaagaaataatagtggagctcattgtgggtccaagtcatcatcattgtccccttagcaatctggcgtgtccacattatctgctgtgggatgattagctgtatggtgtggatacgttaggagttctggagtcagttggtgaccaagcaagacaccaacttaagaggaagcaggacagaaggtaatagtaataacaactgccgttcctaggaacccccagcatgggaccctagcccgtcactgtgcatgcaggctcccatttactccacaaacagagtaaaaatacatattctggactcagattccctgatctgaatcctgactcaaccaactactggctgagcaagttacttaagctccctgtgcctcagcttcctcatccataaatcatggagatgatagtagttcctacctagttgggctgtgatgagaatgaaatgaattaatccatatgaagtgtgcagagcagagtcaggcgtgcagtaagtcttcaataagtgttagctatcagcctgaaaaataacatatatttggttgtataatccacttaggaggtaggtcttatcttgtatgttttacaggggaggaaagcaaggtatctcccttctacccaatgttgaggttttcaactttgactaatcctctttttagataaaaggtagtctgccccaggaatggagagaattagggggctccattatggtgacatgtgtggtaccatggtcatcttcttttatggagatggggctgtcatggggccagtcctggcaccacatcgcaaagtccaggacaaagctaacatgtttgtgctggcttgacgtgctgttgactacccagcacgcggtcctactctgaggttccactgaggtcggcttccctacaaactccctgtttggtggatcgtcgtcctctggcatttgctcacagaatgctagacttctgacttgtcaccatgttggggcaccaacatttctcttttctgcactgatttctccaaactttgaaaaaacagaccaggctatgttagcacaggagcaggtacccacaggttccattcagtgcttagccactgattacctgctgtgtggcccatcctctactgagcgttttggaaagttctctagaggtatagtgtgtaggctgtgcccccacatgagttgggcatttcaagatgaacacacatgcaaccattagagacaacatcaaccctgtgttatccaagggatgctgaagtcattttgatcaggtggcagaagtgactggggacatctctttcaaggagcatcagtctatggtattacccgggcaggcttctgaatgaggtatgacttgtcatgggtctgaaagactggtcagattcacagaggcagccacttttctctcatccactgctttagtttgaataaacaagctggtaaggtgtggttgctcatgcttgtaatcccagcactttgggaggccaaggtgggaagatcacttgagctcaggagttcaagaccagcttgggcaacacagtgagaccccatctatacaaaaatagaaagattagccaggcataggggcacgtgcctgtagccctcgctactctggaggctgtggtgggaggatgacttgatcctgagaggcagaggttgcagtgagtcaagatggcaccactgcactccagtccctgtctccaaaaaacaaaacaaaacaaaacaaaacaaaacaaaaactggctgctcatgcttccattgctaggattcacctttgtatccctaacatccatcaatgtcatacttatagtagatggcccagttaattaacctcttgaagctctgggttaataacatacctgcctatagggttgttttgagatttaaatgaattaatgctcatcatggccaggcatggtggctcatgcctgtaatcccagcactttgggagggcaaggtgggtggctcacttgaggccaggagttcaagaccagcctggccaatgtggcaaaaccctgtgtctactgaaaacacaaaaattagccgggcatggtggcacatgcctataatcccagctactctgaaggctgaggcacaaaaatcacttgaacctgggaagttgcagtgagcagagatcctgccactgcactgcagtctgtgtgacagagataaactctaagtaaaataaaataaaataaataaatattatttattttacttatttatttataatactattttactattatttatttaaaatgttatctgccatatagtaaatgttacaaaacatgaactattattattattgtcattatggacttcacaaatgttaggcaagtgttgacttatcacggtacctggcgtatagtaggttctaactaaatatcatctcccagtgcctagcacggtaccttatcgacagtctttttcatctctgcagaattaacaaatgaataaataggtcacttgtttaatccttgtcctccaaagagaaagatgtcagtacagatcagcaccaagaaatgtgatgagtcgcatacatgtgtgtgaatcaagaacaataatgagagtaaattaagtctgtctgtggctcctcagagtgatactttttgatccaggccttgggggatgagaagtccatgagacacagaagcagagataaggttcatgatggagggaacagcaggatgcctctcccaggggaaccttcggctaatccttgattgtattagtcagggctctccagtgaaacagagtcaataggaaatatatatatcaatatatctaatacagatatatatcggtatctatatattgatacatctatctatctatctatctctagagagatttattaggaagaattggctcatttgattacagaggctgggaagtcccactgcctgccaccagcaagctggagacccaggaaagctggtggtgtttgagtctgagggccagagagtcatagagccaatgtcaaccccagtccaaggataggagaatgacaagagatgcccagttcaagccggcaggaaagaagcaaaagggacaaacgcctctgtcctctgttttattgttctcttcagaccctcaaaggactggatgatgcccactcccacaaaggagggtagtctactgaattcactgattcaaatgccattctcatccagagactctcccagacacacccagaaatcacactggatctgggcaccctctggcacagtccgcataaaatgaaccatcccactagtggcgcagcccagcttccatatttataagataggaattccattcataccgaagagaagacatttgtcctgaggtcttggccttcctaaagcccatgaacctctttcttttaccatggtactggtttggttttcagttgggctggggttttacttctcttgagtgtgagtcttttatttatggcaagcaaaagggtgactgtaggtcacagcctctccccagggctccctgtggaaattagagaggaaggagcccatggaggctgaaacccccgagtccattaaattaatagcgatttcttctctccctgtgtagcatctcccccaacctggagcttgaagctctgttcaaacgacattttactcaggtggaattttatcagggttccgtcctcaatccacatgatcttgcaagagtcaaggtaaggaggaagaggtgacttctgcttttattccatcttggtgtgggtctggggggagtcctgactctgtgctgaggggacacacctcctaggttggccacgagtcatctcctaaacacctaatgagatcaatcacataccagcaaccttgaggtcacccttccactggtcccaggacctccttctgctggcatatgcaacactacctataaccatcccacacttggactggtcataacatgaaacttgctttgctggattcctcaaaatcagctactcatcaaggaagtagaccagttatatggacccagtagctttatacaacataataatcaagtaattcctatattgaacacttaagttggactcaatatagctctgacttctattatttacatctgaaagaaacattaggctaaaatataaaataaaattttactaagcgataaaacatttgagctttcttttttccccatctaagacgcagggtgtaaaactaaacatgcagttatctgatatcattgataatgggcgaatctttttttccagaaactggtaatttagaatcttctcataaagcacacctgaggcttagaagggaaaggtacaaggcaaaatggcatctgctactttacctatgtaatatagattttgtaagcatgttcaatatttgcatgccagggggtgtacattaatataatgaattcactgaagtctaaatgctaactgtggtcaccgcataattttgtaaataatataattggccaagatgaataatccaaaaggatttggataaattctttctttatattattaaagaaatcagagatgatttgtgacataccacggaggatattatggcctccctcaaaatccaggaatgatctattaagtataacataccaagtaggacagattgcagacctgagccagcataagaattcttatgctcatagagtccagttaatcttgatattatccagacataactcaagttattgcttatgtaaaatcttatgagaacgtagggacaattgttattgttcgtggacctaatttaaatgcaagcaatcattagcacatcaaactcatggtcccctctaaggaataaacccctgtgggctcgtgtttggataagtcagtaggtatattttgagttcaactgtaacacattatttcatacatagatttgttgtcttctgaatatctgaatactaatcggatactaagcaatatggtgatgttatctgatttagagctctgatctcttcccagcctatagaaaatgaagatgtgaaaaaggtcagatgaaggacttcagagtgtacatttctgaatccccaatactcagttaccttgctaactggagagaagggatttaacccacccacctccaactcctgataggaagaattaggatgatggtgcagatggttgagaaaggaggtggggaggagactgaaaggcttaattaattgttatttaaagaaatctggaaatcctacaagtaagcaacgatgccaaatgaaaagtataattaccaaggtacatgttgtaccctccaacagcaacaagatgaaatgtttataccataacaagaacttggaacctacacttttgacaaaaactataatctctcaggctctcaggattgttttttttttttctttgcaaagcttccccaagaagctgtcaacagagagagactacactcgagcatggctatttatatgtttgtgttctgtgaattttcctttcggtgtcttagatagagtcagcagatgcatgcctgatccttgccaacaagtactgcgctgacccggatgcggaggatgcctcgaatatcatgaggtaactcttggggcgctgcggaaggccctgggcttggcagtctgtggctgttcacggcccttttggatcttctgcagaggactatctctatgaggcctttttgccccacaagccactgtacaactcaccagctgcataggcctgggggagccgaggctgtctgtgtgggttggggcagtggcacacagggtgtcaccaaccggaagctcaccctcagcaggtggcagctctagggcttacagctggccttgggtttgagattccttgagacagaactaggaaatagattgagatgggtgctggcctgaattaaagtaccatgttccctaaaggaaatgggcctgagatatcttaactaaaggcagatgcccccaggggacattttgcaatgtctggagatgtttttggttgtcacaactaggggaccgtgctgctggcatctgataggtagagcccagggacactgcgaacgaccctgcaatgcacaggtcagcccccaaaacagagaattgtctggcccagaatgttaatggtgtcgaggctgagaaaacccttactagggctttccaagtgtgtctacggcatattgattcctatcaccccaaaggggaatttagtgaccagttaggctgtttcatccagtttcccaaaattaatgttctttcttgaaaggcttttcagtgcttttaatactaatatgcatctctgagataacgtactatagaacactttccaaacctatttgactataagcctctgctcctctcccacctcccccaacccccccccgttttttttcatagagacagagtctcgcactatcgcccaggctggagtgcagggactcaatcatagctcactataaccttgaactcctgagcccaaacgatcctctcacctcagcctcccaagtagccgaggctataggaatgtgccaccacacatggccaatttttagatttttttttttagtagggacagggtcttgctatgttgcccaggctgatctcaacgaactcctaacctcaagtgatcctcccacctgggcatcccaaaactctggattacaggagtgtgccgctgtggccctgccctgccctgccctgccctcccttttttttttttttttttttttacagaacatctaggggaggtcatactgggaaacactgtgcagtgctttttgtgcacaagggttaggcctgtcaactgctaatattggccccaacaccagcaccttattcttttcttaattcagaaaaaaagcaattgttcagtttttgttccttgcataaacccagtagtcacattgtgtgacaatgaaatgactaaaaagtcaaggtattttgctccaggtagttagaggccctttggaatttgtcttttctgtagcataaattgcagaagagttaagagggctgagaggaaatgataaagggaagcttctggagagttgagctaaattcagtgggatttccgtcccactgcattcccaggaacttttacctaactgtgaacagccatctttcgggccgaaggttccccctctaccggtggcttggtttactgcctcctgggaacttacctgaggttgaaggtcaagaagttacctttacatcctgacaatgtttgcattgcctttgtctttgctttccatcagtggccccaagtgaccggagcttccccatcagtgaggtgggggaattcctccagtgcatttcagaggagccagtcctcccttaagcatctggtccttgtgtctggcaggcaacatctggcaccatcttctcttgccactcagttttctttggcaatatgcttagtgaggtcattttaaggaagtggatgcgtgaactcttctaagctttgggcttgccaggctgcagagagagggtggaacagattctggcttcacacctgggctcattcccgaatcagttacagctgcacagtggctacaccaggatcagggttgggtgtgtcacttgttcctttctttgaagtaggaaggattttcaacttttgacacctttttctgtcattggaaatgatttaaaaaaaaaaatgtaaccctttaaggaacctggcttcactgtcttcaaaattccaaatggaaaaccaaaagaagatgaagcttaatgttttgactccacagagatgtttggggctacctgagtaatagttttgaaatgggtgtttctcttaattgtagtattttatttaaaccctaactgtggtagggttaatatgaagacacataggtactagggtgactggcaggacaaggaggcatagaaattactggtcaagggcggggctcagtggcttacacctgtaatcccagaactttgggaggccaaggtgggcagatcacgaggtcaggagttcaagaccagcctgaccaacatggtgaaaccccgtatctactaaaaatacaaaacttagctgggtgtggtggtgtgtgcctgtaatcccagttactcaggaggttgaggcaggggaatcgcttgaacccaggaggcggaggttgcagtgagccaagatcgcgccactgcactacagcctgggcaacagagccagcgaggctccgtcttaaaaaaaaaaaaaaaaaaaaaaaaaaaaaaaaaaagaaaagaaaaaaagaaattactggtcaaaggtagtatcagaaatgtaattaagtagagccagaactgaggccttggctgcaaaaagaagtgggaagttcagggttaaaaatgggctttgtctttctcttatttgtataatcctccttcctcctcagtttaatgagaccaatctgcctcctttgaaattaaaatgtcaaagatccatttgaaatgagctaatgcagaaaactggctgaagctgtgaactgcaaggcagggctgacagaggctcaaagtccttgagttataagcgtgggccaacgcaacactttttcaaaaataaaatgaaatccttcaagtgcaaaaacgcagggtgaatttgtgctgggagaggctttagcgtgatccatttcctaaattcgtacgttgcagcttttcagataaagctgctccctggctgccttctctccatttctgcactaaaaggggtgaagtggggagcgctgctgggtgggaagtttgtgggggtggtcataataaatgcacttgcatttctgattaggcttaggaggtgggcctttctgtggaattccattctttagccttccttgtcacagaaggaaatgtacaatgtcacttctgacagacttggtaatgacaaaaaccataacttacacgtggagagaacttttaatgatttcaaagcattttcacatctggtctcccatttgctgctcataccaagcctgtgaagtaaataaagcaggtactgttgctcccagtgtccagatgaggaaacaggaacagagagcccagggttttcctaaaggtcgcgcagttcattagtacaatagctgtgactggaacccacgtgtttccattcatctgcgctctgcccctccctttagcaccataattgatgtggggaggacacgtgaggcctggggtgggtgcaggccatgcttaacattgagtttggactgagggcaggtaggagacaattttccaccagatcatgacccccgcaatgccttggcacttatttttaaccagcgtttaagtcatcattttctctattagctatggaaggctgagtccttgatctcatcctaaaagccctgcttagaaatcattttttgtgatagtggccaagcatgtgtcacaattagaaccatttgtcatcctgcttgtttgatttgtcattgttgtctcaagttgttaacttggagaattggactcagcagattgtttctgggctagtccctagggtgtgggagattgcaaacctctggaggccccatgatttgggctcgctttcgatgtctacgtaggcaataagctggcagcccctgctccaggccccctactccccagtacgcacatgcatacatcccatctccaatgcattccaaggggccctcaaatttttcatgcccaggacacagactgtggctgttttgtgattttgttttcacactagcaagagatatggtggtgggaatactgtttaacctggcccagtgtctgcaacccctcaggatagccctggctgctggtcctgatgcaggataggtgagccccaaaatggggcttagcccatgaaggtttttagcttcccccagaaaagaattcaaaggcaagctgatggtagggcagaaggaaacagctttattgaagcagtagtattacagctctgtgactgctcctgcacagcggggctacaccatagagtagcagctctgggcaggctgtcgtatttatacctacttttaattgcatgcagattaaggggcagcttatgcaaaaatttctagggaaggggtagtaacttctgggtcaccgggtcattgccatagaaaggcaagtcccatgagcccagtgcagatagaagcaagttctttgagctttctttctcactgtccacccagacacttaggcaatcatattaaagggtttcctctttcatggccttctttgttcctcatggtggcttccccaaattgtatgtagtgagagatggaactgggactggaattcatccatgcattacaacttgctttcaggaaaggacctggtatgtgcctgtaaagttatgtcactatgaacatattccaagagatagttgatttcataattggacaacgggcttgaaatatgaagcatttcaatcccctatgatctagtaatagtaatgttctagggcctagaggttatagggaacctcctgggtgttgccatggcaatggtaaactgacagggcacactgctgggcttgtccagtgaaaagttgcttctgccccatccctgtttcagctagtcttcaattttgtctggtatctgagccctgcctctggaatcaagtcctgcctcctacctcagtcccatgggtaccccatttggagacagtaaaattgatctttttgtcagacaccatgcataaggcagacctgtctcagcattggttctttctttttcagagtaatctccataaagaactaccatccgaagataagaatcatcactcaaatgctgcagtatcacaacaaggtaggagtgcgagagcccgctccaggtctgaagacccatccacaggtccagcctcttcttcctcattatacaggctcacacacacacacacacacacacacacacacacactctcacatgcccacatgtgcgcaactcaaagacctgggtaaagaggtgtgattgttaaaaatcttcctgggacatttctttctttctttctttttttttgggatggagtcttgctcttgttgcccaggctggagtgcaatggcatgatcttgactccccacaacctccacctcccaagttcaagcaattctcctgcctctgcctcttgagtagctgggattacaggcatgcgccaccatgccaggctgattttgtacttttagtagagatggggtttctgcatgttggtcaggatggtctcgaactcccaacctcaggtgatctgcccgcctcggcctcccaaagtgctgggattacaggcatgagccaccacgcctctggcccatttctttagtccaaacaacgtgtttgcatttggtcactggaaggatgctccttcatgtactgattcattcattcgggaagtgtctattggaacccgaggttcagaactattgatttactcttggatcccatccatacttaagttacaacaacttttatttgtatgtgctgcagtcatttacttattcagtaaatatttattgaatacatactgtgtgattagcactctccctgacacccacaggaatatcagtgaaggagaagccctattttgtgtcctcggggatttagcagttaaggtgtagaatgctccaggcaagtgagtgataggatttctctatctgagaccaggtgaactagtgagtgcataatgcgctctgtaagagtgtaatgtgggacacattcccagagtcgagatgagaatttgcagagttgaatcaggaaaatagtaagctatccagagattaaagagaaaggaattttccttgtgttatagcttacagtgggggattgattagaaagaagacaaaagtcagagtctatgctgtttccctgtgattacttctcagtaaaccagagtccagtgtctcattcaaaggcagtgctccttctctcagccagtcaataaacttccaaaaaaacagctttaggggagggaaggtggcacctttctccatttgatgcagtaccagttatgtccttaatgaaacctagaaaccggaggctgcccagtacctggagccaggtgtcctgtctgtacagaataactcgctgctgggttatgagtaacagcgtaccccctcttatgggccatattccctatgaaataggcagtcaggtgatgcagagaaaaaccccattctgccaaatgcaccagtgccatgccgttatttcttaattgctggcaagtgctggcccattttgctgtgtggaggcccatcagaggctgtcactgagtggagcctgctgtcagtgactggcccaccatccagaacggctgactgctgccagccactgcccagccctcggcaggtggctcccttgcagaacgtgttgttctccagccaacggatttggtggtgggcacccaaggtcacattcgcctgtttgtctctggaaaacccaaggacactgaagagataaagtgaggatattggtaatgtacgggtgtcaagctggagaagtttttgatggcagcccttgtaggtggaggtgaattttattagcaaggctgtgactagtgacagctcctgcagcaacgagctctccttctttcatttgtgatctgaaatttcatttagtgtgggagtgctttaagctgttgtttagatttttggctgaatttagattgaataggaaaattaatgttgtatgtttagaaggggttgtcagttccttttttttctctttccaatgagtgctgatgcagcatcttcaagaaattaaggaggattttagctgtggttattgtccaactcaaagcagctcagccggcctgggatccagacagtccctggtcagtaatcacatgatcatagcaacctgaatgtgtttggcaaacctctgtgttgtaattattcagaaacagtgaggaagatatcaaccaattcatgattatttgcttaaaacacattttgtttagaaccatcccaaactattcgagttttggggttgggcagaatcacttacagatccttggatgattagtcaggacacagggaatagagtgactttgacacagggcattttgttgttgttgttctttcatatctctcttctagagaaagaagaaaacgtccactcatcattgtttgtctttcattccttgtagaattgcaaatggacattcttcaccttgcttcacagttttgctgtgtttcctgagatgtttcctactctttcaatacattttcttcctcttccctttcaacattttttttctgcctttcttggcactttttgctgcactcatcctagatgcttagagatctccatgcattacaatttgctttcaggaaaggacctggtatgtgcctgtaaagtcatgtcactatgaacatattccaagagatagctgatttcataattggacaacgggcttgaaatatgaagcatttcaatcccctatgatccagtaatagtaatattctagggcctagagggatgtagggaagctgcctactttctctccatgtaaaactggccctgagtttgtcatcatcataattgtagacatgtgtgtcatattttatggttttaaaagagctttgacatccattatcttctttagtactcgttggaccatctgtgcattttagcatcccagggtaacttcagagcagggcatctaagctctgtatagacagcgcagctctgctgggcacaaatcatggccaccactctgcagccagcgagcggggagacagaagagcttactgccaccgactctttaaatggagccacagcccattgaaccaaactgtggttcccgagagtaggcattatagaagggctgatgctctccaaagtgtatcttttaatatcactagaattcttggagagaaacgctttcatgctggccatcttttaaatgctggccctgcatcttctgatttgagtgtaaatggctcaaagctcttcaaggaaagattggtttataacttcttggaaaagtatcactcctgatgatttacctctcagtggattttttatttttcccaaagactctagtgaaagaggcctttatctctggaagccaagtcccatgagcccagtgcagatagaggcaagttctttgagctttttttttccactgtccaccctgacacttgggcaattgtattaaatcgtttcctctttcatggccttctttgttcctcatagtggcttcccaaaattgtatgtagtgagagatggaactaggactgaaatccatctctcctggttttccaggacagcgtatttccagttccttctccatgagaggagggaggggtggtgaagtagcagaaatgaagggcagccaggtctgccagacctgctctttatattctccaagttagggagagaggatttgcctccagacttctgggcactaacactggcatttttcatcagactcaatttacttcaaatggaaaaggacgaagtttccagaaacaaaggatttatgttcctgggtcagtctcttctctttgtttcatgcacagagatttccctccaagcattcagcaggtcaccctcactccttccctgcgttggagaaaatataatatccaaaaaaagagggcacagaaccctgagataaggaacaaactcaacttttctatataatcacatggccaagtgtcaaggtggacagtgagaaagaaagctcaaaatatgcctacagaactcaaaccagacagggccatgggggacccaaggatgaaatgcctcagccttataccttagatagcacatgcggataggagagactttctctgaaaggttttgcttgtttgtttgaaggtgccatgaaggttcagagctgtctctttagggcttggaccaaaaaaatctcctttcacacacaatgcttgacttgttcattacttaaactgaatttctcctcattcctctcaggttctcagatgatattactgcaagtgagtatttctccagttataccaatgtgttctctacgatgcccaggaagtaaaagggaaagtggccatctgaagccactggagagtagggagaggaaggaataaagggtagggctagttgttggaattgagtctgcagtgtggggaaggtcctttgatagtttgacagcaattaccacttgctgtggcccctccatgagactatttaaccatgctctcatcagggagggcactgtcatctctccctggagtacccacttttggcttaggatgcacaagattgtcacagaagcggattttgcaagaaggaatttcataagaatagtatttttgaaagcagagtgtggaacccttggacttgctctttgttttcacaatggagtcttccatccttctagttcaactattgtatattgttctgaaagtgaagggaatgctcccttggtgctccttgtgtttgctgagatgtgcagagaaataataacttcaaagccatagaatcttggcactagcagagacttagaagggctctctgattcaacctcctagtgcagagcaaaagttctttccatagtaacttggagaaatacttactgagtcttagggacaaagacctttcattttttaaggtaaccttctccgtttggtagacaaattacatccttaggaagttcatttataaaacaagacaaaaatctgctttcttggaatatataccagtcagtcttaattctggcttctagaacaaagcaggacaaacctaatcttgtacacagcagcacctgaagtattcagatgtaaccatcctgtctctgtgaggacgagagccttcttcaggccaaatattactggctgtcttaactgttcctcaaaagatcttttccagacgctacctcctcttgtctttgtcacttttctctggaagttattcagttgatcattttccctctttaaatctgactgaaaactggatcaagtactctggaactagtctgaccaattcacaacagaatgaaatgttcatttcccttgatctggggagcacttctaaaaagtaaacactggctttctctgtaatgtcacatggctagcctaaaatttgaggttttagttacccacacacttaaatttagctttgtgtgttttgttttcttttatttctctcctgcctgctgccaagctaggtcttctcattttgaatttatatagttgattttttttagcctaaatgctgtacttgacatgaaagccttgtaaatctttttagtttggtcttttgccgatttttccaactctggagaaccttttgaactttgattctttcatccaatgtattttctatgactctctgcttcatgccacttaaaaataattggatgagcatgcctctgggttcttgtctcagggcctgacataagggttgaataggaccagtccatttgcaagagattggaaacgtcgacactgtgatttacctgatgttttaggccagtggttctcaaagtgtggcccctagatcaacagcgtcagcgtcacctccaacttgtgagaaatgccaaattctccagccttaccccagatctactgaatcagaaatgctggtggggggccagcaatctgtgttttcagaaactgtacaggtgattctgatgcccgctcctgatgcctgggagtcactgatctggagtattggaaaggcaggtaaaaaagaaactgaaaatatacaggcatttggcactcctacggtctattagaggactcaacttaatgatttagctagacatcctagtaacccaggctgttgggtctgtcacaagaggaaattccctctgggctctatttggctaaatgacaaacccaggggaggacttgggcttggtgggtgcagaagcaacagtccagagagactgaagtgtgatgagcagaagagttgcataaaacagcaaacatcagaccgcagcaagggaaaagaagggcaagactggatggccctgagtggttgggcaatgctgcatttcccagaagaaatgttaaacaattgaacatttaacagagcaaggtctcatacctgcttttctttccccaggcccatctgctaaacatcccgagctggaattggaaagaaggtgatgacgcaatctgcctcgcagagttgaagttgggcttcatagcccagagctgcctggctcaaggcctctccaccatgcttgccaacctcttctccatgaggtcattcataaaggtaacgtctcgtcttattagagcacattagctcgggattccatttgtcgtggggttgagtagagagcacagcttaaactcaaaacagatcgacgggctctaaccacttgggttaaggagaaattccttgttacggatttgggcatgaagccaacttctttcaaaattatgtttttatttttatttggcacatccacggccattaaatgattgttcaaagcacaatcccctctttttttagataaaccacatgtttatctatcaacaaagcctccgctgttaaaacaaaaatatgatttatatacattccatatggcaacagagcgcctaaagaaaagaattatcattttgctcttttatatcaagtggctggtggacctctcactgtgtggataaatgcagaccatgtgtttgtgctgaagcccaaaccccaacagcataattcatttatttatttctgcacaatcaaggaggccagcaggactgacatgccgcggttgtttgaatggagagcgaaacaatgtactgagtcctcggcagcagtgccctttgcaccgagagacaggcggtctggatgtgttcatgtccttgtcagagctggctggacagacactccagagtccccaaggtggccatacctgctgcaccagtgcaggcaaggagagaaaaaaaaccgactctgtcctcccagggtgggccaggttaggattgtgtttccagagccttgcattgatcgcccagccactagcaagggggcttctggagcctgggataacagtcactccagtcctcatccttagactgttcttagattaggcagtcaaggtgacaaacccgtgtgtaaaacgggtctagcttgagcctttctgttatggcatgggaggcagttagctctggatctgggcttacatcttgcctcttactatgtaaggagcagaattaatagctggcaaggtgggaaattacatccttagaaagttcatgagtcagcacgaggtccataaaggaggctggaagctctgcaatcaaaggtatgagacctcctgccttttgctgtcatgtggctacctaattgactgccaagttccttgatggttttgaggaaatggcctaggttgcaataagagggatgggtgggaagcatgaggatacagatgcattggtgctcaccttgggcacctatgagtgatattatttagagcaggagtttttctaagtccttatccttcgtacctgccaaatcggcattatgtagccaactgatagttaacattgctccacataaaggaacaaattgctttggagctccttcaatcactttagcaacactgatagcaagggataccttgatttaaaaaatcctcctatgctcattatgcagccaaaggtctcagctcagcagaactctgagctcagatccagcttacaaataaagatgttgcattcctttaggtatcttctttaatccaggctgctctcatcctgcatgggtggaactgaatggaggtggcagggaggtctgtgtagctgtgtttagagacgagaccctgaagccagatgtagccacgtgtctcccagggatcttatgttcaacatgaaaagcccagactcaggataaaggactgtcaccacgagaacttctctggctctttcaatcaagctctggtggttttcttccagggcatggcccatgggaccaagcacatggtgtgtggagctgtgctctgcttcctcgtgttgatgtaacatgggctttggcagggccccaccacagatggggccccttgacatgcgtatgttttgattttgtggtgcctgcatggtaactagagctgtctgtcaaggaaattaataaaatggatgtgatgctgattcttcagtgctattagcagcagggaaaacctctgcccaaccttcctccagaccctgatgggcctcacctctaaagccaaggatgtccgctccagctcagctaatcccattgccaagttcctatttaggaagagcttgtgggaaaggctgggcctggccctggtgtaactgaaaacacattttcctctgggggttatgttaccacattatttctgtataaggccaattcccgcctgtttggaagtagctctctgaatatgaccttttgacactgagatggtctttgtgttggaattggctaaggtacatgacctggaaatcacaagccttcccctcatatatttttctcagctaaaatagagatgccttattcacatgctccccattctacattgctatctttgtgtacttacctccaaatcccagatcttcgtctcctttaggtcatggtgaacaccataatggcaccctccttggcatgttttatgtattatctcccattccagggatcacaaagccctcacttacttttgttgggggtggggggtaggtggaaaagtaaacctacaaatggattattgtttacagaaattgcttccttctccaatgacctccgtatcctatgacggagaattcatcaatatttccatggggacaagcaggcctattaggatggacaaagaaggggtgaggctttggcagcacttgatcctttgggaacaattagcatttctggaagccaaggtaaagtgttagctcaccctctcccttcccctaggccggtcgtgtctgttttttggtgcggcagaacccctgttaaaataagagaaacaagactgtaacagcaaagatgtggcacaggcagaagcacagtgactatccactgggctttttaattttattttaattttttgtagagaccagtctccctgtgttgtctaggttggtctcaaactcctgggttcaagcaatcctcctgcctcagcctcccaaagtgctgggattatataggtgtgagccacttccactgggcattttatcatgcatgagaccaaaatgccaagactgaaagtgggggtgatatgtttaataaaagaaagagggattactggccaggtgtgttggcccacacctgtaatataagcactttgggaggccaaggcaggtggatcacctgaggtcaggagttcgagaccagcctggccaacatggtgaaatcccttttctactaaaaatacaaaaattagctgggcctggtggcgcatgcctgtagtcccagctactcaagaagctgaagccggggaattgcttgaacccaggaggcggaggtcgcagtgagccaagatcatgccattgcactccagcctgggcaacagagaaagaagaccccgtctccaaaaaagaaagaaaaagaaagagggactactggcatacaggaattacaaaagaggcccagcctggaggtaccaagaaatatggagcaatgcttctttatctctccatcaatgccactctcaaagataccaaccttaggaccctaagtctttgtccctgaaaacctcactcctatgtggatatatctctgaattgatctaaactttttaggaatcttttttatattttatatacccccatatctttgggggtaatgaatttcttaactttgctaactactgctaaatattttttttctggctatttgtccttaatttactccatttaaacttcaaggcatgccctctacagcttctgcagtgctaggatttaacaaatcttatgctaattttatatctaatacctttaggaaagagactcaagctggcaatccagggatcctccagctcagcagctgctgttaaggacaggttaagcattttgtgcaataggatcttatttgaacccttgagttcctttaaggagttcgcacgaacatcctggtgcctgtgacttatctgcattcacatcatcagccagccctggaacatgctgttcatttgccactgtctgatctcctactcctagcctgtcaggttctagtgagactctccctgctgtcttctgtaaagacccaggcaatgaacttacttagcctatctgctattgcctcagccctgaataagtggccacacttactctctacttggcttcctcacttggatgtaatttaagatccattgatttgtttttgtttttgtttttgagtcttactatgcatacttagcttctcttcagcgtatgaggtttcaagttggggcatggcctgccatcttcatgaattgtgctatcattcttactaggattagctgtctttgcacatgacaaattgtgtgtgtgtgtgtgtgtgtgtgtgtgtgtgtgtgtgtgtgtgtgtgtttagagggtgattaactcttaaaattgtttttcaatgtacattgggacttccaatgtagcacatttaaatagttctcagaattgccaactatttgaagtctgttaatctatcattttatacacacacacacacacacacacacacacacacacaaaacctggaacacagtatgctctccatgattatttctttgttgaataaatcagttttgagaatgaagaaaatatgttatgtatttctagtgttgtttttttttccctatgccgcaagatttggaatttgcgggtgaaatgttacttaatatcgataacaatacacgcttctctgtcatgttttctgtttctgaatgagaatgcactagagaaatcagaagcatgctattcagattgtatcttggctgaagtggatatggctggacacacaaagtttttgtcctagcactaaccatagccaagggaatcatttaaatatttttagtctgggttatgtttatgtgtatatgtgtgcttgtacatatgtatgtatagaattagtctggtttagcagctaaaaatgtaaatcaaggacttttaataatagctaaaaaatactgattcccatgtgctaaatcccgtattaagtgctttagctgcaatatcacatttaattctcacaatgaccatacccaaacttgtcactattattatcctccttttacagtggcaggcactatgggttaagagaatttcaacaacctgcatgcggatgtgtgatttggaattcacaaactcaggtgttcaaacccaagcaaactggttccaggtttgcccttgagtatactgaaaggaaatgtgagaaacgataagggaaaactttagctagtgccatcatcttagcacaaatcttagctttctatagttcattctatgtgaactattgatgcaatagagatgccctggggacctaccatgttccagacagtgcgctaatcccatcagcatccttaggtctaggaagctctggtaagcttcagaaagcttctgttctgacttggatgtatgggcacatgtttgcatagctccattctgtgcatcttctttacctttctgtctgcccagctctgcaaaagcagaggccactgcatcataacagttaccctaggctgggctgagtcagggtaaggaatgaactaggctcccaagaagggattgacacacactgctgttttgaggaggtgaaactaattggagtctaaaccaagtggagctgaagggctggggatgacttaggtaggtgcttctgggacaaagtaagtatattagggttctctacagaaacagagcaatggtgtctctgtgtgtgtgtgtgcacacacatgcgtgagagagagagagagagatgttgattataaagaattggcccacagggttatagtggctgggaaatcccaagctctataaactggagacccaggaaagaagatggtatagtctctgtctgagtctgaaaatctgagaaccagcaaagtcaatggtataagtctagatctgaaggcaggaggagactgatgtcccagcttaagactgaccatcaggcagagggaggaaattctcccttactcctcctttttattctattcaggccttcagtgggttagatgaagcccacccacatgggttgggttgagggttgttgggggagcaatctgctttactcactccacaaattcaaatgttaatctcatgcagaaacaccctccaccctcaaagacacacccagaataatgtttagccaaatatctgggtacactgtgacccagtcaagttaacattaatcatcacagcaagcaattcttattgtctggtgggtgtaagctctgctaaccaggttgaaggaggcataccagaagcagaactcaaccttgcgtggcagggttggagttgacaagagctctgaaatggggccagggctgcaactgataaggctgggattgaggtggctctctacttaggaaagaacaactagtggtaccagagtagagagtttgtctggcaaagtaaacccacatggtggaaattagatagggagatgcaagatgttgcttactctattacccatggacaatgtcaccctaaccacagatggcattatgacagcagacttctgcacatattcctcaccagtggagagcagctcccaatacaattatactcacttccttgataatctcaattattctcattgcttttagatacatagatgacttccatatttatatttccatgaagaacctctcccctgaacccggcgtcaccgattcaactgctgctcaacacctacatttgaataccccatctcctctcagacttaccattccacaatcgaattccttttctttgtccacaaacctgttctttgctcattttactattggcaatgccatccttcccatggctgaaactaaaaactctggagtcacccttgactcatttttaaaaatttatttatttgccctcaaacaccacattcaatacagcaggaaatcctcttggttcaagtttcaaaatattcccagaatcggagcacttctcaccacctgcactcctactactagctccaaaccaccatcatgtctctcctagaatattacaccagcctcctaactggtctgtctgctctgcccttaccaccccacctccaatctatcttcaacaaagcatccagaacaaccttctcaagcatgaatcagatcctgtcactcttctgcataagtctctccatggggtcccatctcatctgaataaagtccctacaatggcctgcaggtcctaagcagtcaggtccctggaacctcattggcttaagtcctgagtgttctcctgcttcttatgttagccacactcccttgggctggtctagggatttttacttcttgttccctctggctggatattccttccctgagcagctgcttggctcccctctgtccaactcttgttgtctttgcttaatattaatttctcagttgagtctttcctctaaggcattagaactgcatttttaaaagggattaaaaatgaattttttattgaaatataataaaagtgtgcatgtaataaatgtacaacctgttaaatacttataccctcagtgctcatgtaaccaggacctagattaacaaagagtacattacaaatatcccagaaccccctgtttttttttaaataagtcaggtgatactacatgatcgggtctgtttctggattctcttgggagaattgacatctccacaatactgagttctccaatctatgaatatggtatatttcttataaagggatactttatgattcaacaacttccctggcaaatacaggaaaatcaggaagaaagtaactaagctcatacaagttctctggggcttgtgagggtctctagagagagtagatgtcccacttcatattctctaggaagtatacagctgttcttctcagcttcattgggggatgaagtttccatgtggaaaaaacagaattgcattttaggaatctgcaccccctccccctccacacaccatacatccacatccttatttactctcttggctttgttttttcccgtggcactctttggtgtttattgcctcttttccctgggacaaggtgagcactgtgaagatggggctacttgctgaatcctcagtgcctagaacagcgcctgactcataatagctactcaatacgtgtttgtggagtaaatgaatgcatcggttggcctcagcctagcctgaccagcctgtattacagacagctgggtgggaccaggaccagcggggacttgtaatttggtgtgattttggtgcagaaaacttctttctttgctactgtatatgattcccttgccaaattaaagagctttgattcaatgtagaaacatgaaatgcaaagctctttaatccttgacaaggattgtgcagaggctggttagatttggttataaagctcttcaactgccagaaaatccagtcagtgtgttgtttaagttcacaaatcaaaataaacacccatgaattgaaatgaatttgctaaaccccagtatcctatttgggtcaacgtcactgtgtacccgcttttcaccctacttagatcccattagatcagaggcttccatgcaggatgctgcctcccgcagtgccactcagtctgaccaagcccactaatgcccacctgaaagtagagtaacttctgtgaaaactatttctaataaagagagaagtaatccatgagctattaacagggattcatttcccctatggccctggtaatttctagaacattgaattaaagcgttctcagacctttacaaattctcaaggcaaacattattagcaaaaagaagcccatacagcatgttagaagatagattgccagaaaatgtcaacggatcttctgaataaaataaaagaagttgaaactcctttccccatcttcttcccttctccctccttcccccaacatgattagaaagtcatttcatgtgtcttatatgtttggtgaatcaaaagcaaatgtacatgattgatggtgacagggaacacatttaactcattattctttactttgcagcaaaatgatttgtgtaaactgtctgcctagcattaaaggtaaagcaaacttagaaaccccaaaatgttatattttcatctaatattttcctcttggttttatagctgtaatcacatatggattcttttatatgggtcttggcatggactgaacaaagagaaaggcagcacagaaagattacataacatatacacagagtccggtgcccagcgaggatggggcccgagaagcggcaatggtcaggacttaatgcgaaaatccagtagaagctgacactcaccctggcccttctcggctggcaggatatagtcactgatgtgaaataagagccatcttattgaacaagcctctggccaagcatcagtctgagctctttcagagataattggcctttaattaattgcatgcattcctgagtccacctgggtatccacagactgggtctactctgcctccccactcttccaaatttttgactttggttttttgagtgccatccactgttagtgattgttacatgaaaatcgcaaagtcctatgtaagccataaggaataaaatatcagatttccttaagtctattggttgtcgttgccctaaggtgattttaagtgtgaatctgtgtccagaacaatgatgaggaatttggaactttgaggcaactattctacacatctaggggtgcaaaacaaggaagcaccattgatttgataccgtgggtattctgttaagaactttggaattatagtaatactttacgtttgcacagcacttttcagtttacgtgatataccttttttttttgagacggagatttcgctgtctcacccaggctggagtgcggtggtgcagtctcggctcactgcaacctccgcccacctctcccccagcaacccagccgctgcagcccccaggttcaagtgattctgctgcctcagtctcccaagtagctgggactgcaggcacgagccaccacacccggctaatttttgtatttttagtagagacggggtttcaccatgttgcccaggctggtctcaaactcctgacctcaagtgatgtgcccacctcagcctcccaaagtgctgggattacagcatgagccaccgtgcctggctgagatatacattttcacttaaattctttatttgaccagatacacaaggaaaccagatacatatggaaaacatgccaaatgcaaagaacctaatgtctctgacctttcttcagttgtagaatagtaagccacaggacccatcaccatagctctttgggaggaggaaatcggaagatgacttctggttgcatggctggttggggaatggtagagctagggccagaacgctacaacatcattggcttctcagctcagcgctttccccactgttacacattgcttctccaagagaaatgtcttgaatgtaaacactgctttgttttatattcaaatcaatagcttctaagaatagaaaccactttgcaacatttgtaaaatgagcttatcctaggtttcccctcaaccatgaaaaactataaaaattaagctcttttccaaggtaggagatacatatgtctgccccattcccttggtggtagcttagtctggaaaagacccaggcaagtgctgtcttgtctagaccataatgccttgtagtgggaggatgtattgctcaagccaagggacgcaactgagtacagaagggagatgatgactggtttgttgagggacatgtaagaaagctataaagtttagtctcaaccatttgaaagaaggaagcagtaggttacagtgcagtatgatagacttcccatgtgtgaaatgtgtctgtaaaggggagtgagatccggacgggttaggtagtgctaataagatgaagaaagaaaagtatcttggagaaaaaaatatagttaatcctaatgtttacagacaccttctgatcataacaaaaatattcaagtaactcaagcaattcgagtggaggtgttggggctttggattgataagtcctcaaggttattagcagagtaatccatttgcattataggaaaatgctgaaggtacatgattccagtaagatttggaaatgattatagttttccagaagtgtttttcattttattttttaaattaacatacagtaaagttgattttgtgtatgtgtagtcatgcaaccaccaccacaatcaggatacaggatagtttccatacccccaaattccctcatgctgtacagtcacaccctcctgtcactcctaggccctggcaaccactgatctattctctgtcattacagttttgtcttttcaagtctgtcatgtaaaggcatcatggagcatgtaaccttttgagattggcttttttcatttagcatagttcccttgacatccatccaggttgttgcatgtatcagtattccatcctttctgttgatgaatagtatgacatcttatatgcaggtaccagtttgtttatccattcatccattggacaccatttagttttcctccagttggggcgatcatgaatacagtcgatataaacatttacatggaagtttgtgtggatataagttttaatttctctagggtaagtatctcgaattaggattgctggattatagggtaagtttatatttaactttaaaagaaactgccaaagtgttttccagaaggactgtaccatttatcattcccatcagcaagcaatgcaggagtttctgtagctccgcatccttatcatcacttggcattgtcaatactttttattttaaacagtctagtaggtgggcagtgtggtatctcattgtggttttcacgtgtatttccctactgatgttgaacaccttcccagtggttatttgtcatctgtatatgctttttggtgaagtgctgggtccattttaattgagttgtttctttgaatttgttttttactgtttaagaattctttatatattttggatctcgttggatatacaatttgtaaatatttgcccctaatctgtagcttgtgttttcattttcttaacttaaactttctttcctggaaagaagtttttaagttgaaatatttggagtttttcttaaaaggttaaacattgagttaccatatgactcagaaataccactcctagatatctacccaagataaatgaaactctatgtattagtttcctatggctactgcaataaattactacaaacctagttgctgtaaatatcacaagtttttttccttccttttctggaggccaaaacttggaaactgagtttcagtggagttagagtcaacatggtggcggggctggttccttctgggggctctagaggagaatctgtttccttgcattttctagcttctggaggctgaccacattccttggctcttgtccctgtcatcgcatcactccaacattgtgcttccattgtcacatctcctatttcttcttctttagccaaacctcctctaaaaagacaatagagattacatttagagcccacttagataaccttcctatcacaagatcgttaatcacttctgcaaaaatctacattcatcccacatgcaaaatacattcacctcattcccccatccccaaaagtctcaaccctgcaaaacaattcaagtccaaaatcagagctgaagatcagcaactcacatgtcccaatgtcatcatctaatcagttatgggtgagactttgggtgtgatcaatcctgggacaaaattcttctccatttttggatctgtgaaactagaaaacaagtactctgcaccccaaatgcaatggcaggacagccataggataatggctatagacagtgccattccaaaagggagaatatggaaggatgaaaggaggtaccggaaccaaacaacttcagattccaatatggcaaactccattgagcttcaaggtctaggaacaatcttctgttgcttaaaatgggcattacaaagtttgagtcctccaaatgtattctttttcaaaattgctttggctattctagtgtccttgtctttccatatatactttaaaatcagcttgcctatacctaaaaaaaattcctcctgtgttttgattggaattgtattaaacctatagaccaatttgggggagcactgacatctttactatgtcgtatcttccagtccatcaatttggtctcttcatttatttaggtcatctttaacttgttttacccagtgttttatagttttcagcatcaagattctgtacatgttttgttagatttatatgtaagttttacatttttggagctattataaatgacatcttaaaaaaattgggttccaattgttcattggtggtatgtagaaatatacattatgtttctgtattgaccttgtacctggcaatcatattgtaccggctagcacttcttgcagaatattgaatagagggagtgggagtagacatcttttctttgtcacctgtcttcaagggaaaacattcatttctttcaccattaagtatgatatgaactatagatgttttgtagatacctttcttttgaggttgagggagttccttcccatttctattttggtgagagttttatttttttcaatcatgaatggaggttgaattttgctaaatgctttcctgcatcaatgtataggatcatgtagtttttcttctttagactgttaatatggtaaattacattgaatgattatacaatattgaaccagccaccatacattcctgggagagaccctagttagtgtgattatttcttatacatgttggtggatttggtttgttaatatttttatgaagaatttgtgtgtgtttgttttttggtgtatattagtttgtacgtttcttagactgtctttgattttagtgtcaggtaatgttggctttataaaatgagttggaaatctttcccttccttctgttttctgggagaaattgtgtagaattggtgatttttttttctttaaatatttagtagtatttggcagtgaaatactactaggtttgggcctagatttttttcttttctgaaagtttttaaatacaaattcaatgtcttcaatggttataggactattcaggttaaatagttaatcttgggtgagttgtgacaattcaaagtttttgaaaaattggtctaatttatctgagtttttcaatttatgtatgtagagttattcatagtatcccattattgtccttttaatgtgggcagtgataaccactctttcattcttgattttgttatttgtgtcttctctcttatttgtcactcttactagatataaagtttgctgatctttgttaaataatcggctttggttttattatttcctgtattttttgtttgtttgtttcctttctgcttgctttagatttactttgctcctcttctctagtttcttcttaagatgaagcttagattttggatttgagactcttcttttttggtgtaaacattttgtgctatatatttcttcctggtccctgctttagctgcattccacaaattttgatatgttgtgttttcatttttgttcagttaacaatattttctaatttcacatgaaacttctttgatccatgaattatttagaagtgtgttgcctaatttccaagtatttgaagatattcctcttatctttctattattgatttgtagtctgattccattatggttaagaacctacttggcatgatttcaattcttttaaatttgttaaggtgcattttatggcccagaatgtaatctgtcttggtgaatgttccaggtgagcttaaaaagaatgtatattctgctattgttgggcagagtgttctataaatgtcaattattactagtcggctaatggtgttgttcatttcttctatacccttgctgatttcctgtctgctagttctgcatcttactacgagaaggatgctgaagtctccaattataactgtggatttgtctactttagttccgtcaggttttgctttgtgtgtgtttgaaagtctgttaagtgcatatactttagattgttacgttttcttggtgaattgacctttttatcattatatattatccctatatccttgtaattttctttgttctgaagtctactttatctgatattaatatagccactcaagctttcttttttgattggtgttttcatggaaaaaagtatatcttttctcctcttttttgtttgaaccaaacctatctttaaaacttaagtgatcttcttatagacagtttatagtcgggtgattttttaaaaatcgattctttgaatctctctttcttaattggttgcattagacaatttatctataatattattatttatatgtttggatttaggcctaatattttatttgctttctgtttgtttcctgtttcagttttgaaaattagactaatttttcaaaaactttgaactctcttctttcttcttttgaatcattttgaacattttcagaattttttttggtctgtggtatttcttatacttctttatatagtttttaaaaaattgattgctcatgggtttgtaatgtacatacttaactttttaagtctacttggattccatgatttgcctctttaagtgaaatgtagaacccttaccaaactataggtttctttaccctccccattttatgttatagttgtattatgtattacagctgttgcaaactatatcagacaatgttataatttttgcttttatctattttaaagaattcaagagaagtatagtctattatattattctaatatttattaatgttgttgttttctctttgtttccttccttttagtatcattcctgttctgtttgtccaacttatgttagcagttccttcagagccatgctctggcaacaaacactgttttctgtcatctgaaaatatctttatttcactttcattacttagggacattttggtggatatagaattcagggttcaacattttaaaagtgttgttctactttcttcttgcctccattgtttctgatgagaaatccatagtcatttgaattgtggttacctataagtaatgagtcatttttctccgattgccttctagattttctctttgtctttagttttctgttgtttgcttacaatgtgtctaggcattattcttttgggtttatcctgttggagttcattgagattcttcaactgctaggtttgtctctggggaagttaaagaagttttcacttattgtttcctcaaaaaaatttttttttcctgcaccatattatttctgctttccttctaggattcctatgatgcaaatgctaaatctttttctgatgtatcagaggaccctgaggctctgtgtgaaacttttcaatacttttttctctctgttgttcaaattgcacaatttatattgacctagcttcaagttcattgactcttccctccatcatctttgctctgctgttgagcccattcagtgaatgttttagttattgtattttttaattgtagtatttccatttgatttttaaaattttgatttttaaattatgcatcccgtcttttacttctttacaaatgtgttctttcttagttatcgggaaatagtagttgctttaaggtttttgtcagattattccaacatctgtgtcatctaggcattggcatctgctgattgtctttttccatgcaagttgagattttcctggttactcttatggcaagtaattttttattgtgtcttggatattttaatttttttattatgaaactctgattcttgtttaaattttgtaagaatgttgataattttattttggaaggtaatgacctgctttattttattttactttattattattattgttattattattattatttgagatggagtctcactctgtcacccaagctggagtgcagtggtgcaatctcagctcactacaacttctgccttctgggttcaagcaattttcctgcctcagcctcccaagtagctgggattacaggtgcccaccaccacgcctggctaatttttgtatttttagtagaaacagggttttgccatgttggccaggctggtcttgaactcttggcttcaggtgatccactcgccttggcttcccaaatactggaattacagacacgaggcactgcgcccggcctgatcggcttgattttaggctacaggttcttatggggcttctatgggttgtgacttcaatgttagttgagttttcaaagcgttggcagtgctatttggatctgtccaatattgccctcagactgggtggtggtctatattgtagtttagttcttagaatctaaatgtgctgtgtagggtcagtttcatccatgcacagcttagcgtgagccccagagtttataaacaatttagtgactacttccccatgtcctctttctatgtgatctctgcaatattttcaggttccctggggtcttcctttttgatcttttgatggaagggctgctgaggctttagttatctggctttctgtatactttctgtgattgtgttcacatctggggccaactggtagaagggcagagagagacaaaaagcaatagggtttggttttcattctctcaggaccataggttttttgggcagagaggaaaattctcctatctcctttaatctttttctggcttgcattgtcaccactgctactgccactactagatggcttggtgttggggcacaggaggagagaaaaagaaaggaagaaaggaaagaagaaagagaggaaggaagagagggaggaaggaatggatggagggagggagggagggaaaaacagtgatttcctccattttttctaagagttacctcgcattagttagttctactatgaggcttctcctggaggttttttgtccacatcttgatgatcccttccaggttctggctgcctcgaggtcaggctagaggataccagaagagaacaatggtaaattcactgctgatttggtggtatttctaattcgggtcttcttcaatctacctgccattgtttattctcaatgtcttcaaatagctgctccatgcattctgtccaggtcttagaacatcattcagtgggaaagacaggatgaactgtgataactccatcttacccagaaccagtaactcagatatctctttagccgccatatgctatgtttgccctgtacagccagaatggggagaatattgcctttaagtcagggtcatcagcatcatggctttttagcatattcaataatcattctctgtggggcaagtttcaggtagttcacctattttttttttaatcagagcctatgaatactataattcagcaaactgcattacagtggcatcctgtgcgtctcctggtagaacaatgtgaggtggccgtttcaacttcaaactcatttggctgatttagagaaacttaggggcacctgtaacatgacactgagatcaatttaggcagccatctgccatcttgaagaatggcatgcaataaaacgtttgaactgagtgtaatttttgtggtttttatcattaactgccacatgtatttcatggtaacgagtgatgcagtcccagtgattagggtttcatgttcggagaaatacaggggtcctgtcttgatggctgtactctgtatacactggaggatgggaagtggatgtaactaattaatatctatgaataagagtcatcacttcctctcttttttccataccctgtaagtagatagggtatctctgcccactgagaagtaacatatatctctgtgcccactgatgctggtgtgcagaagctctttgttgtcagtctggctgtggaagtctgtttattcctggcccccatacctgtggcattgctttttagggtgatggattctatcctttctcctttttctagactgggacaaataggtatagtttcttaagaagcttctgttgatttcttgttttggctaaaatttggcaatgagaaggacatttctatctgtggttgagtattttttttctctttctccttaaataggctagagaggcaagaacaactgaaagaggaatatttgattccccttcagaatgggattgggtattccagtctaactaggattcaattttgatcatctgaagatctcagatagtatttccctgctataagtacccatggaccactatattatccaaaattgctaccacagccctcacccttcctgttatccctggtttgtgaagtgtgaggggggttgtgcggctgtgcagtgggcagcaggatgggacagggcaaggattataagactctgattaggacgcgatttgctgtaagacctggggaaggctactgaacctctcttagctccctatttacctgctgtaaaaaaaatggaagagcttatggtatttttgaaagattatccgtatatgaaagcacctacccctcagtctataaattctctccttcaactttcttaagagatggaggtaggtgctgtttggctttctatttgtgatgagatttgagactgggtcagaactggatcactgatgggagaagatagaggaataatcctgatataaaaccaccctctaaggtggcataaaggcatccctacctacagtgcttacaattttgtgttgccaacacttttgtaaatgactgatgtcggggaaggtccctggagctctttgtggtgagatacggagtcagcagaattttctgactgaatacattttttagggcagcagcattgttcatcaacctaaatgacactggttttcccaaccccttcagcgtctctggcaattcaccctccactccctaaggctagatgattttgtctgcatggataggtgagaactaggtgcatctgtctggtttttcccagtcctctgcaacagtgaagatttgctgactattctttcccatatgttaatgaaaacccatccagcaagtgcagctttgcccagggagagctctgcactggtgttgactgcaaggagaacagctgtgtgctgcaatgagttacctcagtggatagacatgtattattgacttgaacttgctcatgggacaggtgagcatggggacagggaggggtctctttgcccaaacaggatcatagcaagtcctctccctctttccatcttataccaactgcagggtgatggcctgcctgtcagttttctggggatgctgaactacaatgagtggtaaaacattctagaaatgcaacaagaaatagaaaagtgtgcttcccagaactcttctcaggaggcagaaagtttgagattactttgaatactttaataaggtatttgggggaatactttgatacggtttttcggctaggagggatgagtctcctcctcccaaatggcatgttcaagtaatgacagatattttataacttgctttctaaaaagcatgggtctgcttgactgcaaaacttttcttttgctgagtatgcaaaattgggctcaagattgaattactagggtcagtagctgaagactctgaccagggatcattcctctctctatcaccccatctactgctctgtctgtcctccaaatacaagctggacaagtatttttaaaaagaatattttgaataagtaccctttttttttttttgcacactcatcctgtggaccaaggatatgctaggtatccattcaaaatcagtcgtggaggcaaggctggaagtgagtagcaaagccatttgataggaaggagaacgacaggtacgaatagtgtgtggggagtactaactgagagatgtgggcaagtgtcattctggtcatcagggtcctgtttgcccagggctcctttcagaaagccaggctgggtgatcctgcatcatgttaatggtgctacccacacatgatccattttctattttgggagaccatcatgtcccctcaaaatatcaacttctcccttatcatcatatctacccagagttaacttactggccgttaggaaagtccatgggtggcagagaggacctccagagaatattgctgtcttttggggacaaactcaggctgcttaatgtttctcttcaattcagagaaccactgtatgatcactgatgttccagccttttctagcagcagctaagcaataggaagccatgaatcacaggccccacatctaattggcatagttcctttgtctgagcagtagagctatcttgtctatcatcagcatcatcagcatcatcactatcactatcactcattacttataatgacagctgacatgtatagactgtctacaaggtacaaactcaataaatgccatctcttagtatggttagaacacatgctcatctgttgcatagaaagtactccacaaatgttagctatttgccaggcaccctgctaagcactttacatgcaccacctcatttcagctgcctccctaggaggtaggtactagtgttgctctcattttgcaggtgaagggaattaaggcttggagaggttatgctccttggctcaggagcacatgataaggctgggattttttgaagccagaggctgcgtgaacttaggcacttccctgctgtactcagtgagcactcaggatcatggtttcctcctcaaaggaaaactgctaagcccagctaaatacctcagcaatttataggctgcccactttcaatctctgaaccaaatgtctttttgatgaggcctaacatccactctgagaaactgcagaggggaatttctgaaatcgcttctaacttcctgtgaaaatattctctaactgacaagagattgtccagataacaatgaatacacaataaagctggcgcttctgcctttgctaccaggctcacaaataacccatttggcttcccaatcactctgatacctaaaactagcagaatttatgcttgcggctggaatggctctgttcagccagaaagctaaagtttacgactgaaccctttgctctgaaatgaaatctagtctctttggcgcgactttattaggccatattgtatggcgataggagacataagtacccagaatctgctgtcactaaaacaggactgggttggcgagcgttttcgtcctcacactcaatactgtgtcctaaaatgggaaagttgaatagaaattagggatgcaaatcagggccattttctgaaactttatttttaattgaattcaatatagtcatgatattgcttctgtatctacacaacccacattccaatggagattcagctattactggggtcactgaatcaatggagagagactaagtagataaatctggacccctgaaatattgtttaggctaattatcacaacagcccaaacacttggatacccatcttgtgcttaattgtctaaaagctttctctgtaactggctccaatatctagcaatacttcatggaaagcattctttttcatctctggttcaaatcctttaggctgtaatcgattcttctgaatctcttgtcctcaaggcatcatggagaatacttgccccttattcttcaccgtctttgggaacagctccttgctactcaaaatgtgggccctataggggaagcatcagtgtcatctgcgagcttgttagaaatgcagactcatagacttgaccccacctcaggactaaggcatgagaaactggattttgccaagacacttgggtgacatacgtgcatatcaaagtatagatagcactggactccatatttcaaaggacttttactaagtaagccctcagacacatccactggtgagaccttgtcatttgctaacagcagtggctggtgggattctcaccaaactgtctaaaatagtaaagatccttcaaaggcacaggcaactctctagttttttgtgttatcaaaagcaagctccccattcctatgtggattcaaatgttctttctaactcccttcctcttctcccagttttttttttgtttttttgtttttttattttttttttttagaaaagatcaagttgttttggcctcaattttagaatttaggaataatgaacttgccaaatatcaccttccctgggctcagtctacttcctgttgaattgttgtttgactttactttggaatccaaaaaatgaagacaaggagaagacaaggagggctgagtcacatggggaagatagaataggcatgagatggggagggacggggcttcctctcccagaggaatgcaggcaggacttctagctagtaggaataactccagttagattggtggcaatatatcagttcttgagagttttgtctttcaaattcaagcctccaagttatcggatttagaatttagaaaaccgtaagtcagttgctaagaagcccaagatgttctgtaatgaaaaatttcccagaaaatattgctcatagtaagaagttttttgggaagtgtaaaaatgacccagttatacatactccctggtagatcctaacagtgcagaaattttttccatgctcagaagcagaattgatttatttcatgccccaacactaaacgctatgaagttattgaagttattcatgcttacttatgatcagatgcctagaaaaattgttcttgtttctttaggcctctctctccagttttatcttgcttagttcaactcagcagatattaacccagcacctcttatttgcaaagtactgtgctgctccttctagaagatacagagctgagtaagacagctcttcctttaaggagcttacagtcgatacggaaatggaattccacctcattgtagttctcttcagatgtcagagaagtcaaatgctgtgatggtacttaatgctaatcaccacacatggagcacttactaagtaccaggtactgttctagacattctgtactgatcatctcattcagcccacatggcctcctgagagatgtgtgcagttactattcccattaaggcagggacagcacagcacattggtgaaatgaggaaaggcctcagagaggaggtagtttatgacttgaaagttacaggaagcactggattttgacaactgaaaaaggtcatagagagacatatttgtgatagaagcgtcaagggaaacagagatttcagggtgggaagtcaggagaggaagtttttagattagcatttcccatcttcttaagctgctccttgaaataaaggattctgtgactaaatatcacgttctggccgggcgcggtggctcacgtctgtaatctcagcactttgggaggccgaggcgggtggatctccaggtcaggagatcgagaccatcttggctaacacagtgaaaccccatctctactaaaaatacaaaaacaaaattaaccgggcgtggtggcaggcgcttgtagtcccagctagtcaggaggctgaggtgggagaatggcatgaacccgcgagggggagcttgcagtgagccaagattgcaccactgcactccagcctgggtgacagagcgagactccatctcaaaaaaacaaaaaagtcatgttctcctcttggagatttacaattcctcttaacatgttaaatactctaaggagtattgtgctgaaagtaaaataataaaattaaataaaacaagttggctttgttaaattctgtgcttcccaagtttatttcattcattcagaaactattattgagctatgactatgtaccacgcacagttccaggcagtggagattcaggtaaaaatctgtgccttcaacatttcccacattctagtaggggccaccacagaatcccctccccattctcctttgtttcagataacacctgctattaagttttgtcaagttctttctgtgaagtattagttgagaacaattctgcttttctgaagcaggggaaattatgggaagtcagatttttaagacagagtggtgccatgttgtggaccagcacaattccaagtgtggtccatggtccatagatggggactgtgagctgtttgatactcatccgtgacgagttaagtacagaagatgagagtaagtgcttagaaactttcaaagcaattggatggattaattttatatggattgtgaatctatgataaaaattttggatttgtaccttgcattggatttgtcttttcatttttttgtaattcttatttatttatttatttatttattgtctcatcatgttgtccagacaggtctagtactcctgggctcaaacgatcctcctgccttggcctctcaaattgctgggattacaggcgtgagccagtgcctggcctgtaattcatttttattagattttgcaaaagaatggatattagaaataaaagctaaaccctggtccctcacctcagatggggtaagaagggctgtcctgaaaaccctgcatacgaagctgaactattctggggttggtttggcagacgtctgactgaaaacatttacttcctgctcaatttacccaaataagaattattttcagtggtatttttaagaatccttattatttgaaggacatgtaaatatgttctttactattagcaaggttgcaaaaccaaattcctctctgaacagagagtgaataggccaatctttaaaaaaggctcttaagtgtaaacaccttttctatattggagagaaaattgaggatagggtggcaaaaccttctatgtgttaaaaaaaaaaaaaaaaagaccagtttcctgccacatatgtaacactttaaaaaataatttctcaattattattttaaaaagttctcatatcactcttgctgtttacccttcctttaccttcagttcctctggcactctgtctttccagaaataaacctggttgggataatggagtgagggaaaataccatgtattctggtacttttacatgtggtgtagtcttttaatcgccctctgaacacctcgtgtgggttgattctttttcataatgcctgatggaagaaatctcatttgatagtctgcagcccactggtctgggagtaagagatttggctcaagtccattccgaaattaatatttggagttgtttatttatttgttcatggctgaagcaaccagttttctggcattccatcaaatccccccaaaattgttttaattgacattgtcctgaagcctttggaaaaatctgagatctttttgtcctagtcacacattctggaaaatgctctctgaaagaggccataattgtggaatgccaaattgttatggagtccctgaaatccaagcaactttcagaaaggcagctgaactgagtccacatccaagaagttcagcgctgagatgcagtttggcacagagaagaaatacattctgaaaaggtgcaaatcactattctcttctgctttcttcctttggcttcaacttgatcactagttaactccaccccagaaagctgtgcagtgaggcattctctgtgctggcaccatttggacctcagctaacaagactcaaacatttcattttgtttattctatgaattgcttttaggatttgcaattatactgaagaacgaagaggctaagaaggggtagagaaggagataaccacatgccctttgataaaaactggggcaagtttgttgacattggaacatagagggaaatagaggaggagagaatctgacaagtcccatgatgaagtcttcttaataccttgctggccttaacatcgtacttttcagcaagaaatgagaaaacgcaagattcaattaaacttttccccttgacagagcatgctgttgaggaatggatacaaatgaccccccatccattttagtaaccagcccaaacattcatcaacttagagcccatcaattctgatttcatgtttagtattgtaggcaaggacttgacacattttgtggggttttcttggggggtgtggggtcatgataaatacgttttaatggcatctaagatatgccagtcagttcatatgactgcattctgtttcagacaatcttattataaaggacagtgacaatgtattgcataattgatatatataaatattcattcaaatgtctctaattcttattaagcacttctaagatttaaaactgtggatcctttataggaagaatatttactgaaaattcagatagactttttaaaaatagtaaatgtagtaagttcttgtgaatacactaaccttctactacctgttttgggcagtgttagtgtgtatatgttacgactcatctcttcttattgcagctattaacataatggtcattggtttttataatttccttttagtgctttatttttgatgtgcataatataatgtatatttggattaaaagaatttgcctgttttcaattaaataaggactagtatatgacaatctttggaattatttacatgacttcacgggtagaggtggacttttgcaagattatttggctgtaatcaacacagttattcagactttttactgggaacagaaatcatgatggctgtaacatactcccagccaggagagttgaatttttcacattcactgggctgttagcattagagaaacacagtttcactctaatcagaggaagcataaaaaataaaaggcatcattaccaacccaccattagtgacacacacagaacctgggatcaggaaggtgtgacttcccgtggagccaaggctgaggtttccagttggaaggtacatttgatgggggagctgtctgcccgtggattggtgtgaaaccatttgcttgggaggttcaactagactggatgaaaaattagataatgaagagtagataaataagacagtaaatgagaggtgtaggcaagctagttcattggctcagtcccctgttctcactgatgatcccgtgtgtatttgatgaataaggacccacagagcatcatctgctcatctttgctaggcgctcttctaaaacagctggggtttgatgtgacagccaaaggataaattgctgcctcaggaaatgctctgcctttgactgattgctgaatggctggcaaattaattctggcacctttccctaagtcattttggtcccattccttcatttttttctgctgagaagtgtgtcttcacattacagttaaaaatacattgacaacacaaatgtggggaacagcatgtactattttaggaaagaagttgtaggctaggaagtttccattttgtataatagaaaccatacttttatgctctgagaggaggcttgaaccgccctttcagctagagccaaaatggattattactccttgctagacgtctcgtaaagtcataggctacagagtttgggcttttgagtccttgatgggcttcggttttgatatttccctctttggtacttgtacacagcaaatcctccccattccccgaaatcctaacaccacaacctccctacacctctatctttgtggtgggtggttaagagtgtgaactctgaatcctgtttgtaccacggattcactttgtgactgtcagcaggtttcttaacctctctgtgcctcagttttatcatctataaaaggggaattcataatgacaataactccctttacctggtccagatttctttgttcactttcattttcttagtattaaacacaaggttttatttatttattttagagacaggatctctctctgttgcccatgctggagtgcagtggcgcagtcatagctcactgcagccttgaactcctgtgctcaagctatcctcctgcctcagcctcctgagtagctggcactacaggggtgtgctaccacacttggcaaattttttaattttttgtagagacagggtcttgctgtgttgcccaggctggtctcaaatatctagcctcaaacttcctgcctcagcttccaaagtgctgggatacaggtgtggctaaggatttaaattcaatgtattttacactgttttttttttctgtcctaagaatgcattgtatgagaaatgtacacttttgtttttgcttttccaaagtaagtcaaagataccacactcgagacttagaaaagttaccttgatagaaggtgataatttcagcccttgggtaggtataaagactgaagttctgttgctgagtttgtgatgcactatgatgtaatgactctgggttctcactcctgacttgtctgatgtgattggcctattcgtgtccttgttctggcatgacttaaggattaaatggtctcagtattaattataattactgattctcctgctcttatgttatacataagggttttaaaaatctttttaattgtgataaaatacacatacaaaatttactatcttaatcatttttaagcatgtagttcagtggaacattcacatgactgtgtgaccatcactaccatccacttccggaactctttttatcttgcaaaacggacactgtctcagttaaacgatgactcctcattccctctccctgcaacccctggcagccaccttcctactttctgtttctatgcatttgaggactctaggtacctcatataagtggaatcataacacggttgtccttttttgattgggttatttcaattagcgtaatgccttcaagggtcatccatgttgtagcatgtgtcagagttttcttcttttttaagactgaataatattccattgtaaattaccacactttgtttatctagtcatctgtccatggacacttggggtgcttccacctcttagatattatgactaatgctgctgtgagcatgagtgtacaaatatctctttgagatccttcttccagttcctttggatatatgcctagaagtggaattatgaatccaatggtaattctatgtttaattttttgaggaaccaccatactgttttccacagtggctgtgccactttacattcccaccaactacatacattgcttgagaatatgacagtgtaattcaattagcaattttagactctttttaaagtgaaattcctttaccagaaacctcaaaaacatattgactatccatatggaaatagtgttaaagatgtggaaatcttaaacagatggcaatggcaacggatttaaatgctccagcatttattcagttgattcgatgctactaggtctagtgtgtagagactatccgcaggtctacacaaggatgtggaagaggcattttgttttctagaacattctgtacttttttccagttatacgactttcagtcctcaagcattttgattagccacagaggcaaacttgcaggaaaaaagatatggaaaaatcagtaaaagtcagatatatgtggtcaggtatatcatagtcagatacatctggtgctttctctagcaaagagaaaaatatggggaagtaaataccagttttgatttaatcagaagctagaacagatcctaagattaaaaatatatgcagtcaatatttgctgaatgaatgactcaataaaacaatttttgctaaattcaaaacaaacatgaataatattgttatcctacaaaaaatgtgttccttcttatttaaaaagtttagtgattcacctacaataaaatttggtataaagaatagcttcattaggacataaaggcatgaaaattctgaccaaaactaaaagaaccttgttaaaaccatattaattgaggaataccaccaatgatcaataataaaggtttgtattttcattatttttgataatcagttgttgtatttaaattagaccataaacaacacattataaaagaacacatatgaaaagaataggctgaattattttacttcaggaatactatttgcccataaggctctagtatggggatttgtaattagtgatacctcatatagtatcctattcattaataaaacaaattatgttaatactgtttcccaaatattctatattccaacatttttttactaaggcagattaggctttcttcaaattagttagagttagtgacctttgcttataagtcaagcatatcttttattcgaaaaaaattattgagatcttatggtttggagaaattaaaaagttcaggcttagctaaacacattgcagttaatttttaaaatcataccatttagcaatagaattggttgagtgacttttttttttaaagaccccactctggggaaggccaatttgtagataaactgctcatacccagcagcactgcctagctaatgtctaacctgtgggagtaggctggaagcagctcaaactaatgaggttaacctacataatctaattgcccagactgagctaaaagcagacaaagagcacagagccagggagccttcagtttatttctaaattttttctggcttttgtatgctggagtgtcaccaagtagatggtaggtgtgcccttgcccactgttcctagctctccttctggtccacatgttgcatttctcccagtgaactgactgactggctgccagcaagatgccttttaatacaagataagcacaagccgttctaaagagccacttcctgttggcggggtggcttcctctcatcttcctcttacccatgcccccactggaagggaagcctgagaggctgcagccaaagacacacagcttgccctccttccctcagggaggcctgtgagatccctaagctcccatagcggctcaacgttctccttgtaattcaccagtttctaaagactgactccattgtaagccggtagcagtggctcatgcctgtattttgggagcattttgggaggccgaggcaggcagatcacttgaggtcaggagtttgagatcagtctggccaacatggtgaaaccctgtctctaccaaaaatacaagaattagggccgggcgcggtggctcacgcctgtaatcccagcactttgggaggccgaggcgggcggatcacgaggtcaggagatcgagaccatcctggctaacacggtgaaaccccgtctctactaaaaatacaaaaaattagccgggcgtggtagcgggcgcctgtagtcccagctactcgggaggctgaggcaggagaatggcgtgaacctgggaggcggagcttgcagtgagccgagatcgcgccactgcactccagcctgggcgacagagcgagactccgtctcaaaaaaaaaaaaaaaaaaaaaaaaaaaaaaagaattagccaggcatggtggtgcacacctgcaattccagctactcaggaggctgaggcaatagaatctcttgaacccagggggcagagattgcagtgagctgagatcccaccactgtactccagcctgggtgacagagcaagactgtctcaaaaaaacaaaaaagaagattcactacattgtgaaatcctttcagagatgcctagcatgaagagggttgctgggaaaaccagctaaacttgactacttagaaaaaatgcatattttaatgaaatttggagcaagacctctctgaaactacattttacttttgtgatactccttttgaaatttggagcaagacatctctgaaactaacattttaccttttgtgatattccttggggggtcagaaaaatctgtcattttgtgcaaagtagaaatatactgtttcattataatatatacatgcttattataaaagccttcagacaatacaggaatctatagaggaaaaaaagtatcattctaccactcagaggtaacaactgttagtgttttgatataaagcttcctaaattctttttatggctttacaaacattcagataactataggccatctaaaaaaataggatcagattatgtacactattttataatgtgcctttttacagaatttctgtatgaacaggtatacattttcattataatttttaattgcttcttagtattccattgtatgtgtgccatttacggttatttcccatttttcatgaatagaaaggatgttcttgtatatttttttacctctgttttcctgtttctttgctatgaatacttcaaatggaattgtagtgtaaaagactgtgtacttttacaaattttgataataattgcaaaattgctcttcaaaacagttgtatcaatttccttgcccactaatgtgggtgagtgcccatgtctccgcaccattagaagtcatacagattaaagactgtgcacggtggctcacacctgtaatcccaggactttgagaggcagcagcaggaggatcacttgaggccgggagttcaagacaagcctgggcaacatagcaagactctgtctcttaaaaaaaaaaaaattgccaggtgtggtgatgcacacctatagtcccagctactccagaggctgaggcaggaggattgcttcagtgcaggtgtccaaggcttcagtgagctatgacccactgcactccagcccaggcaacagtaagaccctgtctcaaaaaaaaaaaaaaaaaaaaaaagaaaaagaaaaaagaaaaaggaaagaaatcacacaggttaaaaaagtgttttagagggcacacactttatgagtttagggttattgaaggctttatatgggtgcagaggccgtgttcctgattgctgaaaaggtcaccattatctaaccagtgcattcatttgtttgcctaagagtgtaactcaggtttcccttttacagcccaccgtcatattttaaactctccgcatgtgttcctttcctttagattgaggaagacacatggcagaaatactacttggaaggagtctcaaatgaaatgtacacagaatatctctccagtgccttcgtgggtctgtccttccctactgtttgtgagtaagtgacctttaactggatgctctttggctttcagggatattgaatgtgccccttgcaaggaagcctcccacctctgctgggtacagttggagcacttgacaattgccgagggtatcccgtgtgctcggccccatgtgatgaataggagggtgggtcattacatggcctctgcctggggaatttccactggccccacttttcttgacaggcctgagagtcttggacttgaattcatcatttatgctaacttatgaactacagttatcctgcatgccttctgtgatgtagacacatttatgaagagtggcataaacccctgcctgtctgattctaagagggcaaaacaaatcttgccagcccctcaatgaaaggaattttaatctgtcttcccatcaagtctgatcatagagacaacagagaagctactgaaataaagccattcaaagtgttttcaccctttgctgaggaaatgtggaaccaaatatacagaaggaggccttgagcccccacatagacaactgccatgttataataataacaagtcttagcttctctttccactggctcagcaggatggatcaaagccacccgccatggccactgcaggtagaatagatggtcacctatgggggatgacctcaagagctccaggtgtctgccgtgaggcatgacagtgcctcagattcctcacttagaatcctcatgtttgcaatcccaccacttttagaagctgaggtgagaggatcacttgaggctaggcattcaagactagcctgggcaacacagtgagactttatctctacaaaaaataaggaaaattagccgagtgtggtggcacacacgtatggtcctagctactctagaggctggggtagaaggattgcttgagcccaggaggttgaggctgcccaggaggttgattacgcaactgcattccagcctggatagcagtgattgtatctctaaaataataataataaaaaatctcagatgttgagtttaagatgaacggggtctttgtgccctctgaaaacacaaactccctgaggttggtgaaacattaagcctattctcctgacaccttagcaaaggatttgacaaggattcttctcactgggaagaaacaggggtatctgggagctcactgggctgaggaagaaaagccatttgcttgcacttcctgcctacatacaaaccaaaagagaggtctgaagacatcgaaacaaaactgatcaggctttaccacaaaggaggggacagtcctgggtgcccttggcctcctctgtatcacggttttctttctgtatgcaggagggagggaggcggagcgcttggtggcttcgtgtttacctggagcctcctgtcactgaacacagcaggtgcactctgtcagtccctgggcccagaccctaagcaatccaaaatggtttggctgtttactgaaatttctcaccctgtctctaagcgaaagttttaatgctaaatggactggaaaagtgaataggtaattgattcggaaggagttattttctgaaaatggatgccctattgtgactcccatgtgtgcctttctttgagagctatttctcttcctgccactgagaggagttaagcattcagaggcattgggtcctggaacactgaggctgtcccaggggatctccccctccctggagcttggtctgcctaggatacaaagccccgggggaaagcaggctttttaacagaagctagttttataaaaaggcaattgaagccttggctgtctaatgtggtggtggtctgagcacatagcagagctgccagcgcctgcgggagtcttatgttggtgagggtgtcagcaggggctccgtcaagcccccttccttggctgtagggtttccctggcctaactggtgtttgtatctaacaagagtgctccctccccaacccccaggcccttcttgcttttccacccttctcttactctgctcttgggaactgagtccgttcctcttatgggtaacttgaagggtcaggactgctccccctacaggctctaactgggatagtcactaggtatgtttgactcacgtagatatcaactagttgctgatatttccaaatagtagtatgtcacgtaaaaactagatttctggattctttagaaaatctaatgtgacaatgcaagacctgcatttcctcagaatgctaactggctccagtttgatgtagcaaaggggttagtatagtcatgtagttactcctccctgatatcttaaaccaggccagatttgcacataaatcccaggcctggccctgtggttgtgtgagtttgccaaccctgacccactgggtggtgtggaacttcactggccttcagccagctcaagagctggcactagtggctctgtgaatattccctttgattgatttttgtatttagaacatgtcccaagaaggagacaaattgttgtcagataatttagtatttgctcagtaaagtttctggaatatatatatattccacttctgatgtgagtgagaatgtgtacaacttagtgctattattcgtttaatacaatgatacagcagaggtagaaatgatcaataaaagaaggacatttaatgagatttaggaacatcccaaaacattgaagctctcctcaagcatttgattatctggaggcttaattatctgtgttttctactttaaattaaagaaaagccataactcaaagttaccagcagtttaatgataacactcttcaattcaggttaattaaagcacagccgtaattagagtgtagtgttgtatatcactgggctggcacataagtattttcattacagtaagaattggctattcaatttcaaaatgacataaaggatgccaaaatatattttaagctggttcacgaagaagaaaaagaattggggaatattctgggtatcataaagcacagataaaatatacagattttcagagcagtttctgtaattatgcgctgcgctaaaacaatatgcagccaataacatcttaaagcatggaaagaaataaatgtgctttttctctaggctggcaaaatgctcccttgcagggtgggattgggagagcttggagttttctcagaagctaggggagtcattctatgaaaagatatgggagcaggatgtaggggtgaaatttgagattgtttcccaagagaacaggaaggagagcaaaagaggcagtgggggcagaaggtcctgccaccccgaaagctatctctatcaatttcaagccaagagattctcagtgtagccttcagtctgtggccaaaggcccaagagcccctggcaaatcactggtgtaagtccaagagtccaaaagctgaggaacttggagtgtgatgttcaagggcaggaagcatccagcgcaggagaaagatgaaggctggaagacttcacaagtctagtccttccactttcttctgcctgcattatcctagccatgctggccgctgattagattgtgcccatccagagtgagggtggatctacttctcccagtccacagactcaaatgttaatctcctttggtaacaccctcacagatacacccaggaacaatactttgtatccttcagtccaatcaagttgacactcaatattaaccatcacagatgcttactccaatctccttctctgaaataggagtgctatgacttatctgtcagtacgggttaatgtcttttcccctctccctcctctccttttccttctacctttatctttctcattgaatataatagaagcacttagaaagaaagaaacacattgcgagctatatgtgtatccaagttatatttacttttaacctttaggaaattctcttatcggttaatcaccgattaatcagatatttaatgaattgggatatgtgcaccattgtgccaagcttggtgccacttctagaggaaactgctactagatttgatcaaatatatgtgcatgaaaagattaatagcaatacttacaaatgccaacaaatgccaagtaaaatattcagtttccctagggtggctgcctccagagtttactgtctggctaagggaaatagtacccatcgtcagagagatctagacacccactgataagtgctgtggtagatgcacacagctggaatagagatgctgagagttatagggacatctccctgtaggctggggggacatgggggttcttcctggaagagatgacatttgagctgtgtcttgtcgggagttttgattcagatgggggataaagaaggaagaggacattctaagtggtagggaatctggaggctgcgccacctggtaccatagggagctctctcaacacctaggtctccgagattttccagttacagcaaattgctttcctctttagatgagacaaagagatgcatcagatttattttgacttgtgatttttttgggggaaactgataacagtgtttttggtgagcacttgcgaaagcgagggtgcactcccctacccccagggagggcagaggggaggggaggggctggacaaggaggagctgcaggaaaccatgggttcagcagttgggctgcctcaagaacactgtgttctaggttctgaatctcaccgggaacctattagtcagtcattcatcatttgcaaaatataaaagcttaattgtatcaggttttacagctcagaggggattaggacaaaagatgtatttaaaatatggtatgtgtctctctctgtccctctgcagctgatggagcagttaaaattcaggtttgatgtggagtatttaatgcctggggaacttggggaactccaatcagatcttcctcagctgtgctgaagggcaggagttctgtccccaagcccaggggcaagtatggatgctactgtgctggtttaagagtgcagggggattctcttttccctcctctacctccctgcattcagtgctcccctcctaaattcagaaaatcatgctctcaacctgtgttattttgcacagacagatctttaaaaagaagccgcttggggaaatttaaaatttaagaccgcccggcgaaagctgggcctcttgcccagtgaaaactgtagctagtttaacttcagttctgtgaaatcattagtttttggagaaagacatccaaatttgaacatggagcagaaaccaggcagacccaattgttatatgatagatttctttagcctggctgcaaaaatgagcattttaagtgaatttatggagaggctcagatctctctctttttttttttttttttttgagatggagtctcactctgtagcccaagctcgagtgcagtggtgtgatcttagctcacggcaaccttgtcctctggggctcaagagattctcctgcctcagcctcccaagtagctgggactagagacgtgtgccaccacaaccggttaatttttttgtatttttagtagatacggggtttcaccatgttgccctgggtggtcttgaactcctgagctcaggcgatccacccaccttggcctcccaaagtgctgggattacaggcgtgagccaccgcacctggcagatctcattttttaaaaaatattttcccctcacagaactggctctattcatccacttgattggggagtattgtaattagggttgaacatatatgaatagagatgtgaatacagtattggtggttatttctactacagagacccaagaggtgaccttctatgagctagtgaataaaccgttgaccctaaagtctattgaaatcctcaataacaggctactgaggcagtggtgggtccagaattctctacagaagggtcagggaaggagtcctgttggaaatggggtggacgcttgggctttgactcaacactgggttcttgtagcaaacacatggttttttctttcatattatgtttctcattaataataatagcaaggctctctaaaaatgcagttgttcacactttaggcaaaagttaattgtctgtatcaagtaatgtatttataaattctagtgtcttaggtgtgctagtggagattgtgtgtgtgtgagtgtgtttgtgtgtgtgtgtgaaagagagagagagaaggagagaataagagagtgggagagagggtggggatattctgaaaccttcccactccactcctatcaaagcttcatagagaaaaagagtcttaacatttccatgaacattttaaatcacttctcttttcttggtgctgagtcttggaaatccggatgtttcaaagtttctttacctggatatttcgatttctagcggctgtcattttaaattaaagctcctgaatgtgaatcttttccattccagcccctcgatccagaagaccttgtttcccaatgtgcagtgtttgtatccgtatctacttcaattgcatgtgccaacctgacattcccaggggccctctggatagctgaagaggggctggtgctttgggtggggttgggttcagggggaatgatgacagttgcttctttcatcctccctcacctgacttgtggggtgagtcctcttcaacagccccaaacctcctctttgtattttcttcctgaaggtgcaaactctatgacaggtttccatgtttaattaacaccagcaagtaatgtttccagtaaagggggctgatttaatggcaggaacaatgtatttccctctgggtaggcagaaacagttggactctaattcttaagagcctttgttcaggaacatctgggttgaaactactgtagttaacagatgatgttggcagtaaaaaaaaaaaaggggggttgggctttgtataatgtcgttgtcaaatttggtagacctttacctaataattatcaagaaagcaatctaacttgttattataacagttttattgcagattgctggcttaagacctttttgtgacaagtggcattttttttcttgaaaaaagaagtcatttctattcccctgtaattatttttgcaaccagcaacaacttcctgcgttggacatactggggcattttattttagaaaccaataattaaattattgctagcttatggctgattttatcccatttatcacattgtgaaggctttcttacttccttttttccccttacctcacctcaccctgcttcctgatttcacaccaattctgtatatgttgaaacactgtaagttgagtaaaggcagaattagaataaggattagatggctaatgctcattcttctttaccaaaaaatggtgttgagtgatgcaagtaaatgtttaaccagagaacatcagttctgggtatactgaaagtatatatattcttgggagtgtaaggggtacataagggtataagagggtctctagaaggtcccaaggacaaattgttgtatcttagaattggacttgcatcttggcattgtggattgaaggcaaaaattagattcccagagcatatcactacttttatttccttctgtatccttcctttcccatctgtctgcttctaacaaataagacaagctaagaagcagcttgtttcatgattctatactcacttccaagctttctctgcatagactttcctagtttgccactttatcttttctccatccctccagccagtcatgagattctactccccattcatacatgcatttatttatccagactttactgaaggcttactctttgaactttgcaaaatgccagtgaggcaaagcatgcatcctgtacaggaaaaactcagtctagaggggagagataagcaaacaagtgattaccacaccagctcccctgttcattcaccttgctctgctcttccccaatggacacctccaacagaggctgcatctctgcaacaggatgcagtccttaagcccaggattgtgacattggccaactctctgtggcaggatctaacagaaacgtgtgatttgaacactcacagagggagccatagctcttgcttccagtgtaaatcatggtgtattatacttgatttgtattttgcaatatctagaggatacctattatagtagggattaaaaacttagatacctatagggttcaggcagttagcaagaaagaatgaagagtgaggccatctgagacaatagagagtggtgggaactgtggcacattggagaacaaacatcccatccagagggataagtgcttcacagctgcactcccttttagcatgtggaatgtggtgccaatgtggccctatctgattttgcaaggaaagctgaaaagccagtttctatgtgaattcacttgttggcatctatttacagttttttaaaaaacactgtacttaccaaacagaatgtgtctgcctgttgggcttgtgactgccacttcatttcctctcttctgatgagaagcatctgtgcagcacattgcgtcaaagactcgatttccacttttggctttttacataaaagtcaattgaccttgacctagttgctctcctctgtttgggctcagtttgttatctgcataggaagggcaagatcagccaatcttgaagggcttgagtctgaaaatctgtgttgtggcacggcttgcctatgttctctctgttcacatcattctatccctctcctttcctttggccagtgggccacagcttgttttgggtcaaaggactttttaaaaggggcttctataaggcattgtagaatcagcttgggtatggatttgaatgttttgaagttatggatttaaaactggaagaggactcagatctgcgggtccatcccctataaggttaaggaatgaatacaaggccacatagaccttaggactttcttgtagaggaaactcttttctttttatatccagttggtagatggtactgtagtagctaggaagacataattcaccattactacgaactgttacttcccttcttaccagcgggattaggtttataaaagcaatgaagatctttgatcccatgaactaccagagtcccaaagtggactggtcattgctcataggatattagcaaattaacctttgcacgatccatactaagtttaagatcagccttctccctgatgtttttgtatttagctactatttacattagaaagtggttacttaatttggtaatttggttcaataaacattgcataagctatcttattttttaaaaaaacaatttaagctccagaagtaacagtcccataaagggtgcatgttagcagtgctctttgggacataaattaaggatggcattttccagctgtagttggatatgtgtgttggtgtttcagcaagctgcataatcagcacaaagcccaggtcattagattctgctggcaggaatcagaaaacctgcaaatcaccaggagatcccagatatgcctggatagaagtggtcctttgacatctgactgtctgctgaaggcagtgctgtggaccacaacctcacatgtaggaatgagcaattggtttcactccctggagagcatgaggccttcagcagcactttccttgaaagcaacacatccccctatccagcacatctgattatgtcacttttctcttttaaaccaactaaaatcccccaattccacttataataagctgtagactccttgctctggaaagcaaagacctcatgatcttgctcccccctcatttcctgacctaatcactgtcacgcttgactttgctcactcagctgcagtcttactgaatttattgctgatcctcaaacactcagagctcttccctgcctcagggcctctgtgcttgctgtttctacttcctagaaagctctttccccatatcttctcatcatgctgttgtgctccctgcatcctcagaatggtcctcctgaaccatcacagatgatataccccttctgagttactctttatattcttaggttgttttattttcaacatagaacttgtcatcatctaggaatttattgtttattcacttgtatattttcttattgtctgtctctcccaatacaaaataggcttcactggagatcaagatgtagggtatcctgccaggtattagctagagaccttaggcatgttacatggactttctgatccttggtttcatcacgtgtaaaatggagctatcaatagaagtctgaataattggggtaatagcttcctcttagggatattgaggggattaaattgacccacaaggaagccttccccacactgtgacccagtatcttatcccccttacaatgctggagctaaataaataagcatcaactcattgttcagtctatcagttaatcaatattctattattcaaaatggtaatgctaattgtagacacttgtcatacatcatgtatgtaattattttgtttatgtgagcttttattctgtaagtatgtaagtgtataggttcatctaactgtattgtgccatttacatattcatgtatttttatatatttgttctatttacatgttcatgtctttttatatgatattatttattgatcttatatcttgaaatattctttgaaaagccatttagaatgctagtaccatattgcactgtactttatggccttattattggacatttaggttgttttctatttttctactccatataaataacacttactctgaaaatctttaagcataaacattttactgcaccttttgttattttcttagacttgaaacccagtaagtggaaaccatttgtttgtttagcttctctgtatcggtgggtctattcactatgcactatggagaattccaaacaagtccaggactcttaaggaagttgctctggttaaggagacaaagttcagacacatgaaacaatagggagcgaccacagccagtgtaaaattgactaaaggctcagtgatttggttacagacaaggtgctgggagagttttgagaatagaaaatcacagggtagcagtagctggagaagacccactgcttgcaagattagagttgacgtggcctgtgaggatgggttgggaagagagaagaagggatcgagagtggggaacgcacaagggaagggatggaaacaggaacaagccagcctcaaagcagtctgctctgcagtcgagagcaccaagcagatgaggtgagacagcttggatggagccaggagtgacaatgccatcgtcatgtgctgggcacttacacagaggccaagtattattaccatcattgcaagcacacaggggtctgctcggaacaacaatatgagccatttgtacaaaagaccgaaacggaatccaaataacaggtccagctggtccaaatctttccctccccctgtagttaacattttactacccgaccgagtaactaatgaatctggcccagagtaaatccccaggcacaaattcctgcttgggctctgtgtctagacagccagacctgagtgcaatttgcactttgagcatccagcaccttatcacttgcaagaaatcaggtttaatagggaagatggggaggtgttgcttccaccccctccctttggcacagtgccggtggaatgaggatcccctcggtaatgactgcattaggagaccgaaagatcgtaatagtgtgtgttatgtggctctggtcattcagaagaactgattgggaggcttctccatctcattgcaggctgtgttttgtgaagctcaagctcctaatgatagccattgagtacaagtctgccaaccgagagagccggtaagtttgcggtgacccagcagccagctgacacttttgatggtgagagtgcgttctgagaacggtcggttcacttctgctttcttgtgcattatttatctgcatggaaccagatgtaaaacctctctgaccctagagcacatttcgaggcatgccccatcagacactgcagcttctatgccagaccagcctggcacccaaagccctgctgggcattcagagagtgtttctccagggaagagggatgagtcctcaaaatatctccacctgatcatgccgacctggacttttcaccttctaagtattaaaccagaacttaaaacccctttttactgctgtgagcaaaaaagcaggtggactctggcctcctttacagcagccttggggtagagctgtgaggggagacaccaactctcttgatagccaaattacaagcagcctattgtgtaccatatgtgcttctcccggtgcaaccaaaatccaggtggcagaatatcagcttcatgtaaatgagccaggagagtggagctcagaggcaggagctctctttatttatttattttacacttaattatgtgcaaatcagactgatgagggactgggtctggttgaaatagataacatcccagtcaatatgtgagttcacactggaggtgggaagcatcgtgctaacaagaaattttgctgatggagtactgtacaccttacagataaaatagagatgatttttttgctccccagttcttgtcaatagttttggaagaaagagagctcattgagaaatgctcaagcttttgttctctgaaatgacacccacagtctattcctctatagttcatatttttgatcctgcagatgcccaaatgtagagtgcagatcccctccaacaaacaccttaataactgagcagagtacaggggaagactagacgtttccttttatcatcatttaaggagttttccttatctgggtgaataacccaatacagccagactttcaagtgtatagtctgtgtctatgacaagacaaaacaaaagaaaagaaaacactggattgtaaacagatcaatccaatgttttctgttaccttaactaccagatcagattgctcacaaagtcaatctgatcaaatgttaagctattttgaaaacccaaatcaaccaaaaggaagaaaaaaatggtagatttggtggccatatgtagaacatggctgtagcagttaacaaatatgtagatagataaatattttctttttcatgttggcaaagtgaagaatattgtttgcaaaaactgacagtcctgattattagttgttcagcagatgaggtggaattttctggggttactgtttacccatgtttttgccaatactcacttgtacctgtgtaggggaactgtatgtatcctggatttttgcaaatgatattccccgtgttgcgaaatcgcaaatctttgtgtaactcagtgttctctatttacttttgtgcatctttcaaaaaaaaatgtcatgatgtgggtgatgctgatgctgcatagtgtttttcgaccattctggaataatctgactgcaggagattgcaccctgaaccttgagcagttgtctttcacttgttgccttttggttccaaggagagaaaaagagcgaaaggctgttaatggttcattgtgaactcaatgtcactattctaagaaaactaactcagagcactccctgaagatgaaacttttcttggataggcccttcaattgagtcacaattctgagatgttttcaacaaagccatatttgtagatatagtttttagtatatatatatatatatatattttttttttcttcagaaaagggcaaaaaggacttgtttggctttgtttgggctttctttgtgcagttgccagctttaattctcaaatgtggcttggtctcagtgtggaagcacattggttcttgtggaaaaaggtgtgtttgagggaatgtggatcatgcctctgagaaaacacaggacttatcaaacacaatatccacgtgaaaacacacattttttaaaatcttccctgagataataattttaatgtttttctttatttaaacatgtcccacttctttccctctcacattttctaactgactgggtgtgaaaattcaaaggacctgtttctccttcccaccttctttaacctgtgtttaactgcctttgttgttggtttcaccccatgatactgttttcatgctttgccaaaaaaccttgttttcacatgcatccttcaagtgatttgaaacaaaggttttattccttctttccttctggtgtcagtcgatttattatcaaattgtttgattttaaattcttttcttgtcgttttgcagaagccgaaagcggtatgcactcttcgttaacttttcttccaacctccaccctctatcttcactcctaaccacaggactaaccatttgccaagaattcaagaagagagagattatatatatgtatatataatctcattcccttgtctggtgtatctatattatatatgtgtgtgtgtatatatatatatatatatatatatatatatatatatatacacacacacccctctccaactagagtacataaattggaagtagcctatttctgttcctgtttgatttgttggttcttttggatgacgcactaacttctttgcaggaaacctaagaaaggaaaggcacactcctgttttcagtcatggcaccaataatgggaacaaatactattaaagttgaacaggaggatgcttctctccagccctttgtgtctgtttctgtattgtcctgacgtgtcttgatgtccattgcactctagtgccattttgtctacataccacttccacattcccagtgacctcctcctccctgtgtcgagtttcttgtctatagagcagaattcctgtccttttatccacaaaacagagaccaagcccttacacttctatttttccttacatttattttggtgataacattttgaatattttatttcttgggcagtgctcagtatagtcttagaacactgctattaaattgccagattatcacacttgatttacagagttagtactgtttattgagacagactcatggcttttttttcctagtgtgtttgggcatatttcttaatatgaagtttctcaattttcaccatgtgatttcaccctgttttgctgctgttttacattgcatgaagcatgactaaatcatcatcaatggcatttaaaaaaaaacttttgggttaatagttccaggatagcttttcaataatgtgttatctaagacaatattgttgaaaacatactgttgagatgcctacttgttcatcttttcaagttacttttctctgtgattgtaatcactgtcatgtgtttgtgtttgtaattgtgtgtgtgtgtgtgtctgtgcgtgtgtatttgtctgtatctttttccaaaatctgattcttctgttgtttttttgagtacatgtgtataaatagaggtggcttcctgtcagtttggtattattgatatgatccaactgcaagaagttactgcaacactttgcatcttaaaggtccacagtggttgcacctctgctgttggcttttggcctttgagtccttttatcttgtggtgaaggcatgttgtgatgtaggcatgacttgtcctaagtataccagaaaatgatttggcttgctcccagaaccaaatatccagcattatcctttctagatcacctctctgttccccatcccatatggctaatatttttttgtatgtacgaaatatatttgaaaatgccatttctaaagttactgagatggatgcaggctgagtaagtcctcaccagtatctctggtggaccacagtggcagtcatttgagtctgaccaactgggagcaatctttatcatgctgtctgtgtgtaagtgaactgggcttaagtatattgacatatgaaatacacaactgtgtctccaatggtatcctaaagtaaaagtgtgtgtgtctagttgtgtgggactccagcagcagcatgtatttgaaagcccagaaaaaatgaaaagttccagaaaggtgataagatttgagatgtggggtttctctgaactgtgcctgcacatagcctgtaaactacaaatgcagtcatactctctgagaggggacacggattggttcaaacaaagttccaactgagagtcattgtatatgaacttgtgtgatcaaagaagcctcttctcaatggcatgattcatctgggcatagcatgaatggaaaccctaaatggttcttatttgcttgctttagttaatgaagtcccattagcttgctagacacaaatataattactacgttatcaagcacaaagtatgttctcatataagtcatgctattttttaaaaattgcctgaggaatggtacattacacctaccaaaaatgaaagggagaggagagaaatatatatgtatcatatttacccataatggatagaagtttccttaaacaatatctgtttcacttgaattacgaatcataggttgtcttcagaaacaggaaacaagtaaagtttacaatgattgaagacaaaactagatgtcccccagttatgcacaagtggtggagaaaggaatgcattactttcctccatcaagctgcagtcttccaacctgaccagtgtttagcgagagatacccaatgaaatgtgatacaacttgagacgcggtgctcctctcatggagggacctgatagaggcatttccctgcgggactgagccccgctagccaattgcacgtagatgtgttttatgtctaggaacccatatttctctttgaagttttgctttcaatgttgaaatcaattgccccaactttgcaagtggcaggctgtttacatattgggatatttacatattcatacttaacacatctgagagattgctagatcattggccaatcccctagccctagcagaggtgtggtcactcctttaatcggcctgactgatgagaattgtagcttgttctttgaaagaaaactgtgacctcctttccacttatttgtgaaaaaaaggaaaacttatggaactgaggctttaaaaacttattttttttattcattcaacaaatagttgaaatgtgcctgttgcgtgcaaggctctaagcctgctactccaggaaactcaaaggtaaatagaatgtgatcatgttttgtacccctctactcaactgtgggttccttacagaaaatacgtatttgctccatgtaggaggtgagtaaacaaagaataagtcgagacttaaaactagtctgagagcaaaagaaacagagacagcaagggaccacaccagccccgtgcttccagctgtcactggatgttttctgttgaaaccagtaaggtcaaagaagaaaggataatttatatgttccttgaaatgagggaaagtccacctctgccaacatgtccttgttggaattctgttaatggatatatgggctttttctcttagagattttcctgattcttcacatgacacatgttgaagtttatctctgataaactagtgaattatataaagttggagctagagaactgattcagagtggcgcacagagagagagacttttggcagtcagtagaacaaaacaaacttaacattggatactctcctaaagagatcagagatccttggaaaaatttatgtgttcctattagaaggtcaataacgaattctaaagatagtaggcaaaagggggagaaggttatcactatccagaatccttgtctttttatattttgaagaagacggggattagcattttatttaaactttctagatttggaatgtgtatagaagacttaatgtcgaaaatattaaaaacaaaaacaaaaaccagtaatgtagtttctggtgcttcagcgccaagagcatctttatgtatctagatttctttctttcattatttcaaggactggatccattctttagattcccacccagaaggctgccttagccttagcttagtatctgcaaatggttctgccttacacctcacatggggatgatttaaaccccctcacccctgttcacagggaataagagggcatcctggaatccacatgatctgtgaggtaattagagatgctttcgattccttacacaatcagccatagatttaaggaacacaggatacttcactgtgcagacaaaagtcagtctaaattagcccatcaccagatattgtgcagggataaaatgctttggatttccttgcagtcagtggaaaagtctttcaatgccaatagggcacctcctgggtcatttattagcagcagggacaaagtggagggtgatggtgctgtgaggatttttttacctctcagttttataatcacctagctcactgagagtagcaactaagaatttaagaccttctatgtgtcagtcatgtagcacatagtacatactttaactctcttagaggcattgtaagctagcgattattcacccattttacagatgagaagtgtgaggcttacctgcatttgcaaagccaggacccattttacagatgagaagtgtgaggcttacctgcatttgcaaagccagtgcatggaattttttgtgtatgtccttatacattattctgtagcgtacagttctttaccctataatttcatctcattaatgggcaaggtattttgataagaagactgtattatattccatggggtcagctagagaaaatctgtgataactttgttgaaaatgaaatacactttggatttttttttgcaagaattaaaaaaaggaacaataacccacatgcattgagccttctatacatcatctctcttaattctctaaagattattgttaccattatccacctcttgtaggtaagaaagttgagttctagggatatttagtaactggcccaaagtcaaacagctattaagtggtagtgttggaatttggacccaaattctgattgcagagccagggcatgtaaaaactgccttgcaggaaaggaggttaaaaaaatgtgcaaaatttataatcctgcctttctaaaacatcatactgaattggctttgaaagataaattcatctaaactgtatgagctctaacacttcaccctcgtgattgcatgaagtcagagggcttgttatacccatgtgaagagttggcggaggggtcattaggaggtgcttatggagagccgctgctcagtgcaggccgtgctattagtgtggactgctgctgtctgatttgggaggaatctcactgctgcctgtggttgtagggcagaacagttaaatcttcatagccttttggtattattgagtgttaataatagtcatgacacaagtacagtttcctcctgtcaggtattgttataagtaatggtagatgttcttgtgaccacaaaaaattattttgcaataatgatctgctcggaggtctcccaaccaggtgaacaaaggttcacctgggtccttcctgtatgactacagacgtatcacttcatgaccacaacacttctctggaatggtttatcagtaggaaaaaagattatgtgttaattaccatcctctatattttgattgtttggggcagctgagaacttcctttagactgattccaaatatctattaccttattaagcaacatcttttcagaacaaggaatacctctgttgtatctgttgttttattcagaatccctgaattcagtatccattaagcctgaagtcttttctcagtctctgcatcagacaatcttgtattctgcttttgatctgcagaaaattaaacttgtttgtttcatccatttattagattaggatacatttatctcttctgtcagtccaaacacaacttggtccgctaatctatttatgccactttgaaataggacaatgtatatttaggttcccacttctctgcagggcaagtttttttaaggggaggtttgcatttgttttctcaatttgcctcaattaggacatgctagacacacatcttattcaaacaccctgtacgtttttataaacagcagactggaattgttaagtatatccaactgctgacttaaaaaaaaaaactgtttgggtaaatccaattcttcctataaaggctgtacatggaatcaatttccatgtccttatcaatgtcatgaagacgttcagcttgcttccgcattggttacgggtgtcttgtaccattccctgcggtaatatgtggtgtgtgtacatgatgtttatgtatatctataggggtcccattaatgctctgtcatttaatggaaaattgttgtagcaatagcttcatcaggccaataatgcttccgtgttgaccaccaatagcagtttcaaaaggaatttattctgatggactttgcttcaaatcatgtgcccatgatggcagctagactgctccattatataaacccaggccctaataccttgatttgctttgatttcctcaactgggagcatgccagcctgggaagtaagcagtagtgcttaatgatggcattatccaactaaatgtatggggcagtggacattggactctggacaaaatctttggggaaagctttagactagtgggccccctataaacacaacagtatggtgtagccttcaaggttttattcagaacatgacctcacaaatgtatcttctctgtttgtttttgttcactgagcagtatattaattaatcctggaaaccatcttaagatccaagaaggtactttaggatttttcatcgcaagtgatgccaaagaagttaaaaggtaagagtttattttcaactggctttctttctggcccggctgtagacaccttgacccacggaagtaggcaggcttccataaccccaaaactccttaacatgtctatggccatcaactggtgtaagaaaaacttccacggactccagttcatgtagtgaattccacatctttgaatgagaataataaaattttagaactaggaagcctagttacctgctcatttattttgtgagggagaaaatgggggctcagagagctgaatgactgctcgaggtcatcctgattcctgatgattcagaacaacataacaagacaactggctccttatctagtgctctttacttaatattatctgggaaatttacttgagaattatcagttttctactactctccctgccaaatagaatttcaaaaggttgggattaatttcagatggaatatgaaactggctctatttctatttgtggcctcctaggtaagtggctgaagttgtcagcttcaattgttaagccactgtaagtgcagcacaggatttcactggcctacatgtttcatgacatttttattcgtatccttaaacctgtttaagcagcctaggaattcacagggccctttgcagcacaacatggaatattattgtatttgattctatcttatgaacttggagaaatttactagcagaaaatgtgatgcaaatgttcagacaggtcattcagctcaacagtaatattgcataaaatattttaagtacattattaattgtgaaggtctatcattagttatataagcctattgtcttcattgaatgagttcctagtcaaagccaggcctgttctaggtgtgctacattctttattgctgctcttcaaaataaccctggaaggtaagtcttctcaaacactcagagctttggtttcctcatctgtaaaatcgagataagtgatttgtccaaggccatgaggcacataagtaagtggtggagcccagagtggaactggtctttccttttctaaaatccactctctttctaccaaatttaataatactaccacattcttacagaggagggtttattacaccccagcactattctaggtactaggttctctgtatctaaaacttgttaaactctcacgcaaccccatgagataggtagcattactctttcccactttacatatgaggaaactgaggcacaacttggctaactaacttgcccaaagccatactgctagtgaggaataaagccaggaagttggagcttgcactcttaattatttgcctaggttaagcctgatacgctgagcacagaacgatgacatgtgaccgtggatacttagggtcctcttcctccccatccactctagcaaactaagccatactggctacagaagcttttgggaaaaagaaaacatgggctgttggaaggaaaaagaattcttaaactgagtgctctaataacttaaatttatttctgcaaattggggaaagattgccatgattgagttgtgggggaaaaatacctccctactcagttcacagaatctcccggttgttcaagagtatcctgagaactgggtacacctgagaagggaaattaggattaatgggactgaaccttccctctccctgtgctccaatcaggtctcctggagaagaagcttgtgcccttgtccagactgtgagacacaaaagcttgaaacagcatctcagcaccaagtacaggaggctggggagcacaggagaaccatatatcacgtatacctcccagatagcaaatataacatgaaactcccatttgtgtaattctatttcctattgcatctctcactaatgaatgtcacaaatatcaggccgtccaaaaaacaaattacctcctatattagggagtgcaatatgtctcatttcagtgctttatggtattcacaaatacatgctgacacaatcagctacaacaccaggctgtaattttccatggcatgtgatgtgtcaaagcaaatgctgtcagttaggggatctcaaatagatgaagactgcaaaaaaccacagaaaggacattggagatttgaatgaaactaaacaagctttgtaaaaatggaaaagtagattatgatgatctcgtatcgagtttgcaccctccactgcaaaaaagcaacaaaagaagttaatgaattctagcttgtagaaaccttcagatgcagtgttttagtaaatgaggagtgaaaccatcccactgcagtcttaagaaggtcacttgaggatgggcatttgggtacttgctctttcctccttgccaccaaatattttccttttaaaataacgttggaacatagactttaatataggagtcacaaaacggtggctcagtgactcagtttggcttgcacatatgatccttttgagtcacaattttaaaatacaaatgagttgccaaggtgaaaaaagttacgagcttttatataaaaatccttattactcatttctcctgaaaaattggcagacccaacaataccgggaagcagtctcaaactcactcattcattcgcccatcaaatgtgtataagtcgtttacatttagaaggctctatacaaggcaccagggaaacagtggtgaaaaatgaacaatggggagaagtcccaactctcgtggggctcatattctaggcaggaaagaattacagttttttaaaaaataattagtggtaaaagaattaatgcaactgggtcactgatttgggttgggtataagtgaaagcttctcagaggggttggtatttgagcagagattgagatgaagggaaataatccatcaggcagggatcagataggaagaagagatgggctgggaagaagttcattgtggatagggaccccaagaaggaaagtgcggctagggaatagatttggggagagtggtatgagatgaggttagagagaggcagaggctggctcctaaagcactttatagaaaggttggatctgttataaaatggaagtcattgatggctttaagctgatctgatgtatattttgaaaaggtcattcttcctgcattgtagagaatgagaggaatggggcaggagaagaggtgagagactcagcgcctattgcatagtttaggtgagagatgatggcagcttggactgacccctgagtggaggtggagagaggtgggttcccattcagactgtatttgggagagtgtgcagaaccccccaatgaattgggcagaagtgaggaaaaaagaggaatgaaggatgaaggctagagtcagggcttagattgtgttgatcttaaccaagatgagggatactagagaaggagcaagttttgggtagtaggaagttaagcattctatctgggctatgttaggtaggagatgtgtactaaacatacacacagtgatatcataaggcggttggatcttagagtctggagttctggggataagtgtgaattggagatgaatatgtaaatgtgggtgctgtttcttgtcctggcaagaaacagatgacaaacttaaatgggaaaaaggaggagagttttatgaagagactgtaaagttatgggcaaatagtaaaggaaaaccaacaagggatggccaagcactgcagagctagcaagaaaggggaagccaccttcaccctagatctgtggggtcaaggggaaggagggctatcaggagctggagagagaggctgtcgtgtgccatttcatagacctgtacaggagggcacccggggggtcaaggtggtgacctcatcccccctcaccctagtctcctgctgactccttccactggacacgcaggccaggaaaccagaggacaaggagaccatacaggccagccttgcaggacacaaagctggtctgatgatgggtgaagcaagatcaccagctgaaggctgcttgtgggaggggtacggtgagctggagcaagtggagaggagaggagagagagctgttttggagtgtgagaaagcaagcaacaggagaatggggtagatcccaaagagtggaaaaggcccctgaaatccatggttgtgggtttaaagtgaggtcagcatgttttctttcccagcgaaactccgttgctcaggtgcaggtgtgcagtaagggaggggctttgcgaggtgagcatgacagaggcaaagatgggtggggaagagaatgattcttgcaaagaaatgccacttggcagaggtcagctgagcttagatactctgcctgctccagatcaccatggacacccccgacccttgcctcatttcacttattaaccttaattgcctagccttggaggacattatgcttagtgaaataagccaggcaaacatcgcatgttcttatttacatgtggaacctacaaaagttaaactcatagaagcagaaagtggaatggtggttaacaggggctggggttgggagggattggggagatgtccatctaaaacatgaaatttcagttagacaggtggaataagttcaagaaatctattgttcaatgtggtgactatagttaaaaatgaattatataccagaaaattgcaaagacagatttttttttttttttttttgagacaatgtcttgctctattgcccaggctcccaggctggagtgcagtggcacaatctcggctcactgcaacctccacctcctggattcaagcgattctcctgcctcagcctcccaaggagctgggattacaggtgcatgccaccatgactggctaatttttttatttttagtagagacagggtttcaccatgttggccaggctggtctcaaactcctggcctcgtgatctatccacatcagcctcccaaagtgttggattacaggcgtcagccgccacacccagccaagacagtagattttaagtgttcgtaccacaaaaggtgtgcttcagtttctttatctgtataatgtatatgttaattagcttgattcaactattccacattgtatatgtatttcaatgtgttgcataccacacatataatacaattattatttgtcaattaaaaataaaaattaaattaaaaaagaatccaactttagttcatgaagtaatcaaactttatcttttcacaagtctattcaggcttattatcatgtcatcatctctttagtatagaccttgggctctggtgccaggctatgtgaattcaatctcagctttggtacttttagctgtgtggccttgggcaggtcacttaacttctctgtgcttcagtttccttatctgtaaaatagaaataataatcatacctccttcaaagggttgtttgaggatcaaatatgtttaatgcttataaaatacttagaaccacacctgacatgtagtctgttctctatagatgttagctatatgattgttaccgttattatcattatgtgttaagagcaacaaagggggagggaaaatggccaaaggaagtggacgcagagttactttccccaacttggatgctttctactttcctgttcttcctgtgccaaggcagattgattgggttcttagccacattgccactcagggtcaacagtcagctaggatttctttttattttttttttaatttttttgagacatagatgacagctggcatttaaagaaagagtggagaatttgctaggatagagcaagcattggacttggattcagaagtcctggggctggctgaatcccagcatggaatgactgggcagtccacgacaacctcctcagtttacagatgaggacactgagtcccagagatttaggctgcaggatctccaagacctcgtgtggatccaaaagtcttaacattggtttccaatgagtgccaattataaatcaagtcctgtgaaaacataaaaaggaacctaagaatcaaatggtcaagaattgtgtttatttctgcagccctggtcaagaaaaggccatgttcatagctggcattcagtttcctgttgggagtggtaaaggcaacaagccagggattttgttagttcttggatccagaaggttgtagggttgttccagtgaattttatcacctccccagtactgaaagggcacaggcctcttgtgctgttctaggcactgtgatttcaaatagtgcttgaatgatcttatttttcttatccagaatatctttgacacagctaatgcactgtggaatcacctatggacattcaagtcagattaggggattttctttttgagtgcttcatctcattctccttctacctacctattgcttcaataagctctactcacccccttccagtggtcagctgagctttgctccatagtgagaagaaaaccatcatttagtgcatgttctcagggctggatagcatgggaattggtccagtcagctttggagtaaaataagctgtgaaactccagagggggtttgacagaggaacccactgactcgtggctttcgtttttccctctctgcagacctcctcaactctgtctccctttggctgcccagaaaaggtgctttcagagtgacaagcttgatatttttatttgactgagaaacgacatacttctgccccctcaaatatatatttgaccagactgtgggaattttggtgttgtatttaacttccccaccaagggcccagggctcattgcccacatgtccccacgagtagcatcaaaggctgttctcaaaaatgaaagacgaatgagcagacacagtgtgtcacatcagcaacttttttcccagtttctttgtaaatggaagtttatgaaaaggagcactaactcaaatcacagaatcctgtgtttgaaataaatggtcttgcaacaaacatttccgtctgcaaatgtctaaacctttcaaaagattaaaggaaattaatgctggcgtgtttcattaatttggcaccaccgtggaggaaatgtggtactcatttcatttgggtggattatgaaacgtgtcagtttttccattctctttctccagggcatttttttactgcaaggcctgtcatgatgacatcacagatcccaaaagaataaaaaaatgtggctgcaaacggcgtaagtagtgtttctctccctgtcccctccctttctcattcctattccccaaattccttttccttcccttttcttattagagaaacactaaacatcgagagttttcttgagtatgtttatgtttcacccagcagtttaaagaaatatgaaataaatacctgtccttgctttgttagagcagaggatgaaaaatcaccaccatcaacacctaggaatgaaacctgtgcctagtccctgcttctttactctagaggtgcctcagtagatgtgtccagtctaacagagacaagtatgatgtataataaggaggagaactaaagccacagagcacaaagtgtttttgtatcgtgatttccagtggattgggggtccctgagtatatagggttgagagagaaactaaatctgaggacttggtctccaaaatgggagttgactctttccatttggaattcctgctagttttaataccacaggccagagttggcaactgtgataccttcagactgcccccaagaaaagaactttccactgccaaagggcttcagttgccatcgtccaaaggtcgacctcaagcatcatcgctctttggggtagactagactgggctcagttgtttctggcatattctgtctcaagtcccttctaaagcagtttgccactggggcctcttgagaaagatatagtgagtccagaacgtggaattgtgagctcctgagataccatgacttaagtggtctttgctttgagaaggttgtgccttttgcagtaattatgctgtattgcctaatagaaattgttctcaacccttgaaaaacaaacaaaaaatgatgccatccttcctatggtgagttagtcttttaaaagctccttataatcattgctttgattctcaccctaaccccatgtaattggcaggggtgttattaatcccattttacaaaaagaggaaactaagcttccaagtttgagaggatgagattgctgacagtcacacagccaacatacagggatttgggcacacctgaaggcctctattgattctctgggtgctctaacatttttttgcagaagggaaaggcaatgtgggcagtcttgggtctgatgagtaagaacaattatgaaagagtaccccataaaatccttgttcacaagcagaagccagacagaagagcaccattcctaaagtatgccactgaaggaaggacctttttcattgtactcctagagtggggtacagaaaatgtagaaccagtcatctataaatatcactctgctggagggtaaagaagttcctcaacccatggggaaaattcccttggggtgcactcttggtctagagaagtttctgcagaaatcccctcagggtggggcagcttaggaccatgggtttcctccccctgtttccactgacttaatacagctggtccccttcccccagactcttatcgagatgagtatttattgatatctcaaaacaagagcctctaatttcttgggacaagaattccccgattctgacaacctaccgagaagagcatctaagagagaacaaggcctagaatgaacctcactccccattcaacccccacagaccccatgaatccaaagaccttcttcaccaggcagtccatcccagccatgcttagttggttgtggacacagcagcacggatgagttgaccagacatctcctgaatcatttcaatcagaaggagcacagcagtctgagggttgagggaaataagagagaacaacaaatacaagaggtgaacacttctgtaaagaaacgcttgtagtgaggggttgggaaagggaggaaaggtgaggccaataacccctgacaggatatttgccagaccctcatcccacagagtatcaaggaaatagcaagactgtgattcacatattgattagccgttcacatatttttgagtatcttctttggatgagctgctatttttggtttcagggatggagtggtcaacaaggtaaagtccctgccctcctgaatcctttactctggtgaatggagacaaaccatgatgatgtaaataaataaattcagagatagccagtgctaagaagagagaagagactgcctgagggttgaggaatcctgcagtggtgctactttatagcttggaaggtcaggaaggcctcagtcaggggtgatgttgaggccaagacccaatccagatagggagacgagcaaaggtcaaggtcaggaggcaggaataagtttgtggtgtttgaaggatggaagaaaggccagtggcactggggaaagggtagtatgagatgagattagagacggagacaggggacgtggtaagaagtgtgggttttagtcctatattaggaagcctttggaagattttaagtgaggaaatgtcatcattagttcttagtttaaaagatgtccctggtgtctggatggagagcattctcgggaggaaggagtggaagtggaaggatgaagtgagaacttctctgactcttgctctgacattggaatgtccctcataggacgccatagtggaacacagcagactaaattgtccctagaaataagaaataaggatttggcctctagggtatttttccaccttggttccagacaggtaaacagcagcaggctttagcttcatcctggagagagaggcccataattgtttgaaataattttcttctcttcatttcctttaaagttggtggagctagtgaggtatataatctcccattatgcactgcaccaattgctgcaaaaggcctgcctctacaaagccaagccagtgtaacaagggcctcgcttccttctctgtacatccctgtgcctcctcccccaacctcagcttcttcatctcacaaaggcctttggctatgtaacaatcagaattgtctgaatattgctcctactaattaaaaggccatagaacagagggcaggatgcagatgtgtgtgtgaggtgagggggtggttagaataaaatgaattattaaaaataaacctccccatgtaggtcaggcaagtgaggaaattggagaagatgttttagttgcaaagaaactttaattagaagaaactaggattattagtaacacactggggggacccccatgccttcgaacagacattgcttggttccctctctaagttggagaagacagctgacccacatactcatctgtccaaacgtgttagtccaggtattaataattcaccctggaatggtagatcccatgagggcagagctcatgacagtcactggcccttacccatagcttcctaaccctccttccccaacccagccttcccctttcacttccacccctagctcctcattcactttcattcagtaaccttcaacatttcacgtcatctcatccggagaaatatcaggtgcggacattccatttctggaaatcctgtgatagtatagtttaacgtttgcatttctttccatttcttcatagctctctatcaaggaaaagagtcaaattcagctgtctggccgaggagcaagttctcagggtctactatttactcattttctttttctatataacaaaccttgtctaatgatttacatttcttcccccagactctaaaagtttgccaaagtgtggactcctagtggacaagtaatgtctagtttgatgtgtttgaaggaattttctttgacttcaaatcattgacatatctttgatttattttttttctctttgctgccttggaatacggcccctactctattttaactgcacactggtagtgatatattgtgagtaaaacgggttcccagcagcccggagtccagttccccctgtctttctctagaagagatactcttttaattttctgtacagttttagtttcccttttacttttggtatttatgttgcatgtagcagtgacatcatgccccaactccttcatcccccaatgcagtctacagagtagcctggagccagagagtccccagggagcctgctctccatccatccaccccagtccccgggctctggccagcttcgggcactgtcttatttttctatttgaaaataagaccttgacaacagtgtgtttctcttgaaggccttgtctcaggacttttaagggacactgattaggctgaagtaattaccactataactccagatgcttcatcagctggggtaattgtcatgcttgcctttgataaattatacttggtctcctttgttattgagcttggattcctctcctaaaggaaacacatatgccacatatatattcccatgttgtgatacatatatatatatatatatatatacacacacacaatatgtaccatgatgtatcagagtatatgtacattcttatatgtaaaaattcatatttttacatataagagtagagatattccatagagtgatgtatttattgcagtacatgcttctctgtatgagaagtgcttgctagataattaattggttactcaactttgggactgtaagtatctcaattgtcttactggagacaagtatttgcacagtggtaattattatctgcagtctatgaagttcccttgctttacaacaaagtttttcttttagtcagtactcagtaggacacacccagttgctttatgaatgttagtcagacatcttggaagatccctttacctgtttaaggcagaaaagctgactggaggagaacattccatttcagcaatgagcaatgtataagtctgaacaagtcaatacaagtgtctgaacctctaacttactcaaggaataggatgcccttttactcaacaagatgtggccattgaggaggagcttttaaggccagcattgagctttgggtctttattcatgtttgtaaggctctactgaaaaggagacccaatctgtggaacagttcagtccaatggctctggaatttggagaagatgtttcaaattcagtcccctcattcctttgcagcaaaagaggcaagttgatcatctgattttggttagtcatcagtgtttggagggtatagattgctcactttaaaaacaaaacacaatgatgaccttcttcaattcaatgcacagtcttgccaaaatcgactctgtggctttcttcatcgacagaaccctttaaacatggcttgagggcatggcccactttcatacctgcagagctgcatactaaattgaatggtccttcagaattggagagaaaatgtggtgtcaatcaaccaacaactctagtgccaaatacttctgccttcctcagccacaatacagtcattaggggcagaatcaactagctcagtgtgctctgtgctgctgacattaactagctttttctttctcctctgtttttggaaaaccacctggaagacctttcttcttactccagaaggtaatgggaggaattttgctaagtgaagacatcatttctcatttataggacttgaaagaatattctctgattcccagtgccacatcaaaggcctcaccttaaatcctggtggactttttcttccgtggatatttttattagtaacgttagttgctgcagagcccatgaagagtagctccatgtttcttgcttggaaataatccctccttcatttgactgattttaaaagtgaggctgtgacctgaaaagtatctattgattgaatggcagatgttttttttcttccatcccagtcttcccttgaatttgctccatttgaaatctaaaacattttccccagcagttggaaaactccacctgggcccctcagtccagtactgctttttcctgcctcttccaatccaccctggaaattaagattctgcattggaaattggctgacaatttggttgctgatgcaggtggcagatggtgctgaggataggatggaatccaattcttccttccattccaggcttggctcagaaaggccagccagcagagaacctgagtttgacagctgattatccatttgactcaaggaaagagcagtaactgagctgcatcttcaccagccactttccaacaggtttctggtctcatgatcatggcctttgagaatagaggaaaagttgtccaagaacacttctgagaagcctttttgttttaaacactcaagagtaaacaaatagttttgatgatgtccattagggaaatacttctattttgtctctgtaaatagtactatgaagttatgatggaaatgttggttgaatatccacttcactgtggtgaagaaaagcacataaaagctttttctcaaattgtgaaactgccaggacctaggtcttcggaggaaggtgagactcagggtcaaattcttagcaaccacataacctcatagaatccatggccctggtccaataacaagaaccttatgatgtgaaccagagggtaaactgagtccctagagccttgtatttctgctttcctagagttaagttggcctatcggggcagttaattgagcatgaagtttcaagagccctaagatggaatgacaagtagctttggtgttcacacttgccagagacacactcttgtctgctcccagtctcaggaagctgcagcagggctttaaaaaggagacgcagtcagctgccactgaaatagtcctcctgtgccagctgtggctgcagaccctaggctcatctcctaggacctctcaccctttcactgcccctacccctaatcatctgctgtggatcatgagaagccattgaattgaaatgacactgcatatatttcaattctcagagacagcagggtcctctttctgctccttttggagaaaggctagttccaactgcccatgaactagctgctcttccacattgatccactagatgtcctcatagatctactttgtattaccattgacatcctggggaaaaccttgtctgagaattgggatttgggaagggaacaatgggtgactacgtaagaaagaaaattagcaaacaccaaaggagagaggatgctttgtgtggccagggagtagataagaaacttacttctgtttgaaataaatcctgaaattttcaaagttgcactttgagacctaaccttgggaatttaaagtggaactcttcatatctaaaattaaccttctaacctaaatcagctctagaaaaggaaacagtcactgagaaatggaaacaaaacaccagtggttctgaatatccatgattcactgtaacaaaattgaagggttaggaagccagagagagttgagagagatgaggggtggtaatttccaaattaggaggtccatgacttaactttgatataatttaattttacaacttaagagtataattttacacagagagtgttcaattcttctggaacatctaccaccagggagacaactcctcatcagcttttagttaaagagtttgttcatgatttgtataatggcccagaggagagctcttcctggccagtactcatatccttcaagcctgatgaatcgctccaccagatgggaggtcttaccttttaagaaagtggacccagaagtctctaggtgaagatacctgacagggagtcaatggaaatggactatgccagcagtagcgaaaaagagccaccttcccagttggtggcaccttgatctagacattctgattcatgaaggtttgtcaacatgtggggctcaatagtttttaactgtttctgtcttgtctttgagcctctcattgatcgttcttgctgattttgtgtgtgtgtgtgtgtgtgtgtgtgtgtgtgtgtgtgtggtggcacttgtttgtcttttgagatttctattttgcatttggtgtgagtgtaaaaatgattgggaaggaatgacaagtaatagcatgttttcttttttatgcatatgctgctttggaatgtgactgcttataattaacagttaatcttcttatagcacatggttttttgctgcttcgattaccagtttcagcctgttcctgcatgctaacaataagaaattttagaacaatgcatggtcgccagaacggctaacaataacagttgcaaacagtccctgagagccactggtttgtcactgtgtttcctcctgaactcatatcaaggaggaggtttacatcacccattctgatctgtttgcctctgaacaaatagtttcaaaagttatttcatccccatcatccctccccttatccttaaagacggtatatttataagaactttctttctccacaaatgtgtcagattctattattgtacataaacccaaaatggcagtatggaaatgaaaaccagggaccgttgctaatgagaagcatagcattccagagtttgatgggcttctcttctgctacagcatttgattaaaaaaattgtttttcaaaatgatttatctacggtgaagcaaaaaaatcatccttgtttccctcttctgtgtaaataacaaatcaatatttccagtaaaagaaataagaaagagaaaacaagggaatgtctgcagattgtatgccagatccggatgcatttaagataaatttatgttcatgtctttaattgaagacttttttccctttcttgacttcagccgttgctgtttgtttgggatgtctgggcattcacaccatgccttctaaattcctctgattcaaatgctatagtggaacttttttattttttatttttttttggtaaaagctaaagctcaaaggaatgatataccaccattgaacagggctggggctgcatgatgatctgaacaacagactagctaggacactaaaagaacacgtcactaaaaatgtgagccaagtttacaagaatggagttgctgctgaagagatctctcattcatctcccccagtgcctgttcttcacaatcataacgttacccttgcttgacaaatatactgtatggcaagtcataaaggtcttagaacaggacttgacccatttgagagatttaaacccctcttcctggtgactgtaacattcaaagagggcaaaaccacaagccatattttaaaataagagtgcaaccattctctacaaagaaaaagaaagagtgggggaaatgactttcaaaatggaaggtgtgggtgcagggaataacacctcctcagtttaggtttaccatttggcagtaatgcttagaataaatgtgaattcttctcccacctcgtgagagaagcaggccagttcatgataagtgataagcaaacatgtttgcctgttgtagcatcaaaatgaggtacaaaaaccttctcttgtactgaaatataaattggcttgaaaggcaaaggtgaagggcattggaaactacgatgctgacttccaacaacttttataggttaccactcagtttggatccccaggcagtgcagaacctaccataccagctttagaagagctatcaatgctgcatgcaaattgcattaagatatttcacgtggaacctattcttctatttcatgttttgtcagttttaatcgattttggcgaatattttctgtataaggaaaaaagaaataatatgattaaccaatagcctgattgcttcctgaatttctatttggtggggagagaaaggcagatgcgattttcagatcctctcagctttaagcagaaaatacacccatgagtagctaaatgcattccaatagagcaacatctcatatgcttttggtgatttcttatttgtgaactgcctttaatgtcaaatctgcagcgttagtcttgagtagctgcatttcttatatggacagatttggatatttgttctgtcaagagtaaatttaaattcctgtagccatcatataaactcactctcgggaagttcagcaaaggcatccttagatactgtattaacacgtaatcgtttcacatctaatttgatgaaagcttgtcccagcctctgcctaatgcccagaaatggatggaaattagaaagcctacatattagatatttttgcatcttgcaaaaaccatttattataccaaataagcagctaatttcattgattggcagtgtgtatattttgtcctcctgtattaatcatatcaggggaaaagtgttggttacgttttttgctgtcgataatttgctcttcttcccatttgagaacccgagtgtattcagccatgcccttttcctgtggtcaccgctttacctaggggagaaaaatcatgtgcaacagccttgggagacgataaaggcaatttatattttcgctgcttttttgatgtacaaccaaactgttaccaacaatcactctgcatttttttctgggtcaagactgttaaagtgaactaagacctgtgttaaatcccttcagctcccttccagctgccttgctgtgtgtgaccttgccattaattgccgctcttcctctcctcccatccaaccacacggttatagccaagatgtccatctacaagagaatgagacgggcatgttgttttgattgcggacgttctgagcgtgactgctcatgcatgtcaggccgtgtgcgtggtaacgtggacacccttgagagagccttcccactttcttctgtctctgttaatgattgctccaccagtttccgtgcctgtaagtttaacctcaacacacgtagttccatgtttgtgctgtctgtggtatcatccctgtcttgtgctgtgccctgtggttctgagtcagtcgggctgatgtcttcttcccagtgtgaactcctgtgtgctgacatgttgccccagctgcctatgtctctgtgtacgtgcctaggaaggcctcccttctgattttcttaacttacgcttctcgtaacagcatgcaggactgtgatattacagtctggtgatatctttcctctctctcctttaaataaatataaatggaaattaaagtgacagcatatcacctactgtattaatacagagatatgcagaagtgtacatgttaatatttttgaaatggctgtaaattgaattgtatcaaagggaggaaggaaagggtgtagcgagaacaagccagctctagcattgaattgcttttagtgagcttagatagtttcttagatagtttccaaaatacaacagagttttgatgcagatggatatatatatatatatatatatatatatatatatatatatatattttctttttactatgtctctctaacctgtgcctcattcctccagtgccagattttgtcttttgttctggaaacgagttttctatgtctgtcagcctgcactgggctagtggattacagagctttttctcagaatgatgactattttgaaggactgttccattaatatcttttatttttccaatagtatagcccctgtttaactaaggtatcttgcagcaattgtgattccaaatgccaacaaaaaatttaagtcagaaacctctgtgatatccctgagtccatagcacaggcctctgatgtcagtcttctttgtcatccacaagctcagagatgttaaagaacctgtcaaggctatgcagctggtagctggcaaggctgagatgtgccagtttcctgagacctcccttatccttgcttccccatggactttgctgttttcctgatacggttcataagtgaagttcctgaaagctccagtttgagaccctgggactgtgggtcttggtccaagtgcagaaaaggctgtggttccactggaggactttacttgaagtataactataactttgttttcatgttttggtagcatagaaggtaggagatggttctcgtttctgcacttcctcccttcctctttaaagcagccaacacatatattgctaacctcttgctccctgtcctctcaccttccaagtgctcagagctggttgagctacactttcctagcaggggtaggtgtacactgacgacaggaggaagaagatcactgagctcttaagcatttattcccatggaaaatgaactggcttgactcccctgtgctggtgttgaggctggtcccagcagagtgcggctgtgtagccgggatccatgaggcctctagggctcagggaaccgggacttcactgtgtgccatgccaggtgcttatgtttgggcccaaagttcaagtgcaaagcatgatttgtgcatcgagccatattagaggcatttggaaaactttgatctaggaccagagagtcattctctctgattcacgatttcctgctgctccagagcagtgccaagggacaggattcacttcaaagtaatacctaatggaggttgcattgagagggagtgtggactgccatatgggcctaaaatcttggaaagatttctgttacaatccttagatgctaccatatgaatccttatcactttattttcccctgaagagttatctgtagtttgcatgccattacagagataagctagggcacagctgcacagagaacttgtctgtctacgatgtgcagcaagacaccaagttcaaagataggtgctggggaggaagagcagaggagggcctgaggtggcatgaattggtcacatctctttgactgatggtggtgaaagtaaccacaagcccccgggttactcttctgcctaatgcacaacttctgttctcaaataatcatgaggctctaaaaccttagcctagactcagtggagaaaagaaaggagccactctggctctgagctagggccccttggtcatgtcttggcactggccaacaataccaatcacagcacactctgtgtcccccatgtagaccccatggtgcccagtgtgtgtaatttccattatatccaagagaaatcttaattagagggatttctcagctgtgcaatttaatccaaccattgatggagaccagggagaagaaaaccttggggtgggattgtcccattctctaagaaacattctgtgagtggcatgttgtccctcccttgcctccaaaatcagcccccaccagggaacacgtggagctttgggctgcgtgttgaagccttaactggtattgacagctcagggggcgatttgccttctccgtttcatcagtcgtcctgccgtcatcactccatcaaacaaaagcagatttcatccatccctgtgtgagaccactcacctttgaccattaataataagttagaaaaatccattccaatttgagcccctttttgggcctgcataagcccttcttctccaattataaaaatgtctgtctctatgtgaaattccactggcagtgctccaatagcaatccccaggcatccctcgctggtggtggagttgggtggtgcccatttgacagagcaagttgactcaagagcagtggtgagagtgggcttttcattaaatatgaacagatgtgaaatgtagagggtttgacaattagaaatggcaggagaagggcccttgaatcaaagtgaggtcagatgggcggatcagattacttctcttacattctttagttgttctgaaaatcattttgaattagtgtcagcagagccatgatgagttttgccctttgtcttttatgctagggctgtattgtttcccaagacactcattaaaggtcattatactattatggagcttgctttggtcgcagtttcccagttgagccagtgtgctttggagactgcctaattcatttctctctttcctttcgtttccctctttactctattttttttcttataaggggaaaaatttccgttttcaagggatgttaaattgaaacacaaagtcccattatgtgttttgtgaagtgggaagagaagtagctggttcccagaggaatggtaatatattaaaagtgctcacacagttctgaaaacctgccttctaacaacaggggctgcctgctcggtgcacccctctatggaggtgtggcccattactgtggatcggttgagtcatgtgctattatgatagttgtcttctgttgaactcaggaggagatggaaggccagactgtgttgaccaaaagaacttcagaggggaaggactagtttaggaaagacaaaaatcaaaataaaaggtgtcagaaaagtaaggcaaattgtgaccgataaggattcatcacaaaaggattttatttctggcaagactgaaatgttcaatatggtaggctagaatcagtgcatagagtgtcattttatgatcatcttggttttgtttccacttcagatggtcctgggcaagagtcccagctctctcaaaagacatcaggatggtatgggcctcggctttttcacaagtagctgtgttctagtactattaaatgtaaaaaatgaatgtctagcaacatacacatgcacataaatatagaagtagattccaatcagtacgatttcttcccactataattttgtaaaatggacctttctctctctttagaagtttattcttgttatttcagtcttgcctgctatctgattgctaaatgtaatagaaagggacaattaaaattatgatgcagtggcaacgtagggccatactgattcagacctgctgagacctgcctgacatgattctagtcacaaagcatcagtaactctggcacaaacaaattaatcctgtggtagaagagaagcagacctttagacttgcacttggaaccagctttagctaaagtacatgtgtgattgctcacaccaacctttcaatttactaattgtttaaacctgcacaattacatgcagccttttgcaaactactgtagctaattttaaattacacatgacttttattttgggtataaatataatacaagaaggcattcaactccgatggttaagctgagagaagtccaatatgattaggttgaagggagacgtaccaaaatcagtttagtgtaatatcgagtcttgtcagataataaacaaaaatcagcttatcctgagtagcctttggtttgtgcagacagagaattaacattgtcaatagaactaaagtcacttaagtgaactaatggcattttgaagtacataaaatcagatacaagggcagggggtggaaacagctctaggaaaatgtctataataggacacaccctatcctgacagtctccaacgcctgttaaaggagagttaatttaataagctacatttaaaaatcaacagcctataattatctcattccttttatgtgcagttttaggtgacttcctcaaattccccaaacctaaattctatttgcttattttacttctgggccctaaaatcaattactcccctctttccaccaccactaccagtgagaaaaagacagaaaaaggagagccaaggataataagcacgaatcgatgtgatcatagtttttcatgtattagttttaaagcctgttcgtctgagtctccattttctcccatcttcccatgcttgccgtgctgatgtgagtgcgctctctctctctctctgtgtcaatatccatcacacatgtgcacaccaaacactaccagagcctttgggttgtcccctggctctttagttaccctggcccatgcgtcttgatttgaccctttgtacttcattgcaggaagtaaaaacagagtggcagatcggcctaggcagccactgggtcatcccctgtgactaagacctagtgatgggcctggaaggggcttcttaagacactcttattggtagcaggtgaggctacagaagccactgcctcttgcttgattttgtgatagccacgctgagccataggttgactggaaatatgccttactgtgggccttagctcactctgtgcagtgggcagcttcttaaatcagcattgtaaggcagaaatcatgcttgggcaaaattgcctttgagaaggatcctttacatcgctcatctgtcaagagctcccaacacactgggttcttctccagaataaatagctggttgtttcagttgagtgtcaggtaaagtcactggcttgtatttggggaccttgttgtgctttcaccaccttccaaaaaaagagtatggttgaattcctgaagatgaatacactatgaagatgtactgcaggtagatgaaaggagacgggaacagtaggcaaaaggcagccaacttctcaaaagaaattctttgaaacaggattgggaaacaagaaggagaaaggtcagaatgagggaagctgacagggtcctttgtgtataccccatcatgggacacctttcttcccagggacaccatgctgtaataaatgactcggctctttaaggacaaactagaaaagatgttggcatgcctcatgtaagcccagaagaggcccttatgcaaggtgacatagaaattatgtttgcttttttatttcaggacagtggccggttctcaggatactcatcctgacagcttctaccaccaggcagtgaatgcttcctcttacctccatggtggagggcagatgtggccagttagctcctcatcttccatcctcctccactatctcaggcgacagatgccagggccagcccgccttccacttgagctttcttgtcaaggctctgccttgagcccaaatcctgacctttactgtatgaaataaagtactgatgaacaagcagaggtttgaattagagcaggcttggagcaaatgtcaagtccgtctctgcctctttcctccacctgcaccaggagcctcgattagacccagtgtggagtttgcagcgccttaggctttatgggtctggggagacataacttattaacaaagagttattaaatttttatcaattttacaacacaatgtaaatgcctcctatgaatctacattgtattcattatcatttaaaacgttaattaagtcgaagttgcatttaatttctctctaaatgggcctctgggaagacgcttttagaaacatctgtgggagcgtgcggctcacggagctggagaatcccccagcccgcattcaggatcgccccctgagttgattgctatcacgtgtctgtggctaatttgttgtgatgtgattgggtattgtctcaaattagtatcagaccaataatggtgtgaagtcactcgagagaggcttgtggggcagtggcacaggcttcactgcatcctgccttccttccccatccagacagaaacggacagtgggtctgcagcacctgtggtttccatcatgccttgggattctccttctcatatggtgcccatcatttcagttggatacttccttcatcggagatggatgcttgtcatctggcccagcacatttaggacatttgccagcatgctcttcaaaacgatcttaacatttgggatctttgactcccagtgaagcctagaagctgcaagcacagagcagccaaaaatggaaaccagaatggagtggacctagtaatcataagcaggtcatgctcattggtgaggagagacagagggaggcatactaccaacatttgctgaaaaattatgtttctcttttgaggctagcatcatgttttagtcttatctgagcatggggtcactccccaaagagatctatattctgtgtatactgcatcaccaagggagtgagacttgttgacacagcattactaagaaatggctagttggttaacttggattcatgttacgactagaattagtgtagtctctactcttactgtgtgcaagcaactctgagtacacagggaggatgtgtgtatgtgttgttgctgttgttaaatttaacacttatatagcatttgctgcattacaggcactactccccctattaccacaaatattaattaatttaacccttattatgtggtaactgctgtttgcagttgaggcaactataacctgagacatctgcaatgtgccccatttacagataaggcaactaaggcacaagggtctcatagccagtgagtctggccaagggtctcatagcctcatgtcacagtctcatgacttgccaagggtctcatagccagtgactggtggagctgggatttcaacacaggccgtgtggctccacagagtgtggagtcggttgagttgctcagttactcttgcagttgaatatgatggataagtcacttaatctccaagggaggagaaaaaagtgaggattctggtaatgaaacctcgagataatgtagagagtcctgggggggcctcctgcacagcagctggccacccaatttggctagagtttaagacttacttagcatgcagggaattgacccccctgaagggtaaaatggggccccattcctggcaggggccaggccaagggttttgttcttagtctgtaatatgatagaaagtctttagacagtgcgacactatcatattggtgtttgatcagggaagtgacctaacagaggctttgttttgggagggctgctgtggctgcaggggaggaagggactgactagaggggagctggaagcccccctctcggggaggagacaaacagaggggagcctgttgtgggcgggccccagctgttctgagaagccttcagaaggaagacttgatctatagtctgcaggaccctgcaggtgaagcacattgcccagatgcaaatccaagaagttacagtctttaaaagacagtttaattagtggctctggagcagctgaattccatgagcctaattctccccagctgacctggcagccattgtgattcctagctgggtttgctagagtttccttcttattggaggaagatttcctgacccctgacccaggactaggagacccactcggctgcatccactaccactggccttggggatctactgcttctgtttccttttcctaaccattatttcttccttattcctcatcatcttccccagttcaaatatatcttacatcttgagtgtgttgaaggtgacaggcaggcagctctcacctgctggtgtgaagtattggctcaggctgagcagcagacacaaagcaagtgggagccaccagtggggacagctggccagcgctgaggctcttgcttccagctgcaggtggtagcttcagttagagctcatgggaattattctttaaatccctgtatatggcaaggagacttttctcctcctttctcaggaagtcagcatgtctccttacatcgatggggggaaaataataaagtgcttcacatcccattcactgaaaatccactgtagttttcaaacacttaaccttctcgagtggaaatacaaaacacatttcctgtgaagtactgccacacagagtcctaaagaagtcatgtggcatttctaagtatcatgcacaattttcttttcggttttactgctttgtgcataagacctttgtctgtgtccttacttatgtcagcatccgtgattgtggcatttgtgtacaccattgacctcagggggtcattaaaactgcatggaaaagcacttgagtcctgggttccctcatggtggtaggctgtgcatgctgagaatgccaacttctggaagtgcaatgtggcaaaatgcaccaagccaaccagctgtgtgttgtccttctctctctggggctttctcccaaaccagcttgttgaattacctggatagtcaggggaccctccatcgccacatctgcttacaggggttctgcttccccagctgacctttttcccaaagggaatctaaatggacagagctaaatccagcattgtcagacccttgcatttgaaatctcagagggaattgcaaaggcctttctgtaaatagctagatagtgcctgctttggagggagattgctacacatgcccacagatttttattctgaggagacattcttttgatgtccagctcagatgagcaggactaacaaaagtggcctttcttctcagaccatctcatttggtcatcctcagggggagctaatctctcatattcaagggaaacagcaagaaaaaactcccccagccttttctagtaaatctgaaagttttcattctagccccttcaataccgcaagatgagtcccaccaaatgttcctagagctgcagagaaaaccctatgcaaatagaaaatggaatcttttgaggcagatctgcattagggatgatcgactgcactgagagacttataaatgaagtgagaaagactccagccctagagctggcactgcaccagctgtatcgacagtgcatagatgggcatctgcacaccatagagcatgggctatcttctgggaagggagctgactgcttgcattaaaatgatcttcattttggccaatgtcagctttctgggctggagcctgttggatcacactcagtcaagaaaggacccaggggctgccttccctccctccaaggtcaaaaatgtagcatgctgacatccttggctgggcttcctatattggcaagagtacttgaataggaaatggcctgaaggattccagttcagtaaatatttcatgagtaaaagaatgaataaatgaagggcttcccaacccttaaaggaattggtgatgtgctagaagccagatcgccctagatccatgaagcttcccaaaactttctaagcagcaacttactatatagtatatatatgtaaacataaaaaactgggatgtacaagaagagtaagagggaaaaatgtagtaagaaagaacaaggacatgactgaaggaactagaaaatgatcaaatggcaggtgcaattgatattctttgtgaaggataaattatgggaaagaagatctggaaacaaagtaccagaaaaaaccacataggcaaaaatccaccaatgcttccaatgaggagtggcagggttactaccacatatagagcatttgctctggaaaatcaaggacttgtgacattcacattcagttttattaatttcagcaaacctgattattttggtgtgagtcagggcagcataaaaccaatgcattgggcagggctcatgtgaggaaaggagtctgttgtagctagagaggtgtcagcatctgcaggtgggcacatcaacctgcccaaatgtagagcaacattcgaggccttttatggcggtcagggtaatttgactctgactcgaggtaggcagcttgaatgcaacagcagcacccaaatgattcctcccgcgtggaggtatccaaaagctgaatgtctcatagctattacctattaggagccattattctgtttgttctgctcaagccaaggaagagttttcctgattgttctcaaagctctctcaggctgcaccaagcattcccttacctttgaatggttctgaaatgctctctgcattttgtcaaggctgatctggccatttcttcagtgcagatgagtaaatttccacatatggcctgtaacgtatccaactgagagaacatatccagcagggatgcttcaaaaccaaagccctaaacagatgttactgagaagggatgcacaatgacctgcagagaagagagatgctaggtgaaaataaaagctgcaactatgctaggaatgaagacagggaggaaggggctcaggtcatgtcacagggtctggaagttagggcatgaatgtgaaatttgcaaggggctggttgctggaaacactgctccttcacaaacatcttctattaagatgaagatgggaaacaggcagacatctcctgtatttcctcctctctatgttaggggattctgatgccattcccctcactgtgcagtgaactgagagatcttgttggcaattacagcctgaaattctaggaaacgtcagagcaggcagatacaagggtgagatctgtgaattttctggaaactttggaagtaagtcctggtgaagtcatgctttgacatgttcaccaagtagatgctcatggctataataagagtaatgtcttatgtgtgtttgagtctttgtgcttctcaaggcaccaacatcatctcatttcatctaggcatccccagcatagacatcatgtcctactaccatgtgactttgagtaagttccagaacttcactattttttagcttcctcatctataaactggagataataaggacctatctcacagagtggttgcacgaattcagtgagtgaatatatataaagattgcctggtatatgttgaattattatttttatcatccttcattaacatatgaaattaacaaagaaacagagatgaacttgaccaagatcacatagcggatgagtggactgctagatcagaagcttgccatctcccatagtattgatggaaataataatgataagccactttaaccataactagtgcttttttttttttcaaatgactgactgtcatcaagctagccttataagaggtcatatcagctacaggcagagaagcccacagatagtggctgagagttgaacagcttagtataacagactataaaagttaaatggagtcaatttgtttaatttctaggtcatggaataattgtcccaacagaaataagccaacaaaaataccaagagacagctatatctccccagaacattgatttccatcttgactatccagtaggccttgcaaaatttgtgtgtaaaatgaggaaattggaaggtcatatttctaagtttcctttaaactctgagactctgattatcttccttcttctgattgagaaaggctaaaagtcctttttgcttcaatccttactgttataaatccttctaaaatgctgatgtctattacccaacatcgtggtaggtcctgtgaggaacaattatgtgtgtagaaacctcgtagtatatcagtgttagtcttctgtctgtgagttcgcagcttctagggcaggaactgggcgcacagggacacaccgaaagagcccagaagattcttacaggtttctactttattgtcagcttgttttcttccaaggtgtcttttattttcctcaaggaaagcacagaaaaaggccctctccctaacccggggtcctggtattatctatgctccagtgatttgggggttattagtaatcagaacattgtcagctactgaagctatcccagaccagttcatatgcagtgtctctacaaatggccctgccctcccacaatgaatgctaactgttgacctccccaaagagcctcctcatcatatttgttacaccttgttttgttattgccaggtctccaggaatgaaatcgtgtagcaggaagcatatagggccaaacggggacaccatctccaggcaaaagaggcttcctagttggaatagtacagatttgatggatgaaaataaatgtgtgtcttagattttagcccagctgttagaatccttaggtcctgggatcattagaaaactgtgacttcaggtctcatcattcctcatccccctgaaaccccttctttatggcttgtccatccctaaaataggtctggagatcgtcagcaaattcaatgtgtttttgggagagggagggaaagttggaacacaaaaagaggagaacagatggggaaagaagacattcctgtcctttcaaattccatcaaaatttcttttttgatgatggtcttgatctcaactcatctttttctgttgttattgttgttttttgagatgggacctccttctgtcacccaggctggagtgcagtggtgtgatcatagttcactgcagccttgaacttttaggttcaagcaatcctctcacctcagcctcccaagtagccaagactacaggcgtgcaccaccatgtctggccatatctttgaggtccagttggtgttgagacttcacatcatcacctttcctaccttgctttatgagtagctgggctctgtttcttgttgattttgtaattaattagatgagtgcttggagcaaggccaagactgggcccaagtttttcacccatgccttaccactatccctttctttcagcagacctgatgtgtggataggtctagggatgagtggaatgagtatcaatatgcacatttgaaattctgagttttaccctgtaacactctctctttcctcctaccgatggccaagtcctctgatttggcctccagattacatttcgaaccttttctcaccattgccagtggcactgccaagctcacatgctcatttcttcttcagctagtctgccattgttgcccttcaacctttcaattagttcctcttgccaccaaaccaccaccaactttagtattctaaagcacagactttgtcatgttatcccattttaaagagagagaccttttgatggttccttgttttttaagaggataatttccaactttctgctattaaaatggcattcaaagcctttgcagtttggcctcaaccagtttccctagttccgttctccacataagcatccatcatctaacaattctctagaagcgtcttattctcattactttacacatttctggaaccttttcctgagactgtgattcttttcctctctgcttctagcagattaaaacttacccatccttcagagcaggggtcagcacactgtcccatgggcccagtctggcctgccatccattgtagtaagtaaagtttccttgtaacatagtcactcccattcatttgctcagtgtccatggctgctttcaggctacaactgcaaagctgagtaattgtaacaaaaagggtatggcccagaaagctcaaaatatttactatctggccttttagggaaaaagttggccaacctctgctgtgaaggtacagctcaagtactgccatctctgtgaagccttcttaactagcccacccggaaaccaaattagaaaaagtgaatctcttttctgtaagcctgtaacatttcatgtaaaccccattagacagtttttatgttgaggtttttgtagaagtcaaaattggtctttgaattcttagcatattgcacacagtaaccaagacacacagtgtgaattcaataaatggctgattaacatgtaaactctgttgacaatatgtttccatagtttattaagcatgtatctcaaggaaaaaggtctttcatgagaagctgaaccagaggcaaaaaaaaaaaaaaaagtctcaaggctagagatcttcctttcttccttcttgttcctttataccttcttgaacagaacctttgtttctgaacagccaacagccaattcctttgactgctggacaactcttgaatagattgatctcaaattgatcactgcttcttctgaaggtaacacatttgttccgttgtttctgctgacagcacatggtgggctctgtagtggatctgggggtgctgatgttttctccttccatatgtcattgggtatttgagtcggggtaggaagccatggcaaacccattgcttctgttcatccacctatgtttccttattgatttgaatttatcccaaataaatttggatatttaaggcagggtgtgcacctttaattgttcagaccctagccaatggcctagaccttatctcactggactaatacacaagctaacactaggagttatatctaggcagggtaagcccccaactcgaatcttgacagccctgaaccccaccagattccccttcaccctttgcatctgtccagaattgctcctggaaaccctgtctctccagagtgagtggtagccagctgagatgggagatgggatgcccatggcctatgcctgagaccctcctagtcaagctccctgtctggataactggagacacttcgttctcaaagcaagcattgtgacatttggttctcttcacacatgtgccttacccagcttagacagatggaagaattgaatgtaaagagattctacagaatgtattggaaataacaaaattgtgtatgtgtgtttttaaaggatacccttttggttgccgcatgagttattttgttgttgttgttgttgttagagattaaatctcaataactttttggaattagaatgggcttcccatcagctgaatgggctacacactcgcctccttttcatagcaatccaagaactccactgccttcctcacatcccctgctatgttatcagcatggtagttttgcttgagatcaaatcagggcaacataggaactgtcatttttcatttaccggggccctttgatcccatttgaggtttatttgtttcaagtgagaaacacaatccctattgcatacatctattctttagagtacttttttattttatttttttatgttagagatcaaatcagagttgtaagtagtatggtcattagttatcaccactagatttcacaggctacactttatttctgttcttacaaaatcaccaaccttctctgttgcataatgatcacttccagtgaagccacaatgtgcctttcttgggtacttgggtgttaatttatttcacagtttcctttgcagatgcaatcagagtcacctatcacattcctgtttctgctttttattgtgttcctttgctatcgcgtttgtgtgatcttttcctgaaaaatgacaggtagtgtttctctgctcactgtatcagtgacatattttccacaacttctctattgctattttaaaaatataacattttatagatgtaatcttagttgtttgtaactaggttttgttataggagcaaatttcctaaatggcatgttggtttaggtacattttttaaagaaagggaaaaatattttctgcaaaatagtttcctctaaattgtaagtgaaggaaaagctctgttagtaagattataatgcattttcctgatttcttagtacatcgaaattcatgaacattatttttatgtaagtgattaagttgtggcttttaataacacgttgttagagcaaaaagagctatcccttttgatttacttgtgtatttactgggtgacttacagtgctttacatattagaattggtttgtcaacaattaacattctaggtttttatataacccatacttcaggtaatataggattattaaactacaaccagtgtgttagaaatctgcctactggtaatacaattcttacgtataacagcagctgagaaatactgctgtgtatttatgcatagattgcaagacagatggcctgcaagccgcagaagggcctgacatgcaggtccaccagcaggtggcgctgcttttctagaaataaaccctctacctggattctaggtactctcctcctcctcactttctgccttttctcttgcagattgtctcctttatttctctaaaataaatatctaaaactgttgttgctgttgtttgaagagatatacttccagtacgacaatgcccctcaattgctaaggtttatttgaaatccaacttgcctgatgcagtgcttacttgaagcaagtccaagttaaatacatgttactgtttttaaaaggtaactacacacacaatactggattcagcactgagattggattgcctatgctatctgattattgttatgtggcaagttcccattttaatctaatatctatttacacaaattaatcccataggcttctattcacctcaggataatgaggggcatttttattaaagtgactgattgatatactgaattaatgttttatataaaaatcaccttagtatgatgttctttcatcaagagttactctagaatccaggctgggtgcagtggctcacgtctgtaaccccagaactttgggaggctgaggcgggcagatcacttgaggttaggagtttgagaccagcctggccaacacggtgaaaccccgtctctactaaaaatacaaacattagtcaggtgcctataatctcagctactttggaggctgagacactagagttgcttgaactgggaggtagaggttgcagtgagccaagattgcaccactgcattccagcctgggagcctgggtgacagagcgagactccgtctcaaaaaaaaaaagtaaataataatactaataaaagagttgctttagaatccaagtcatccaaagaatattgcctttctctcggggccagaactacattttgacaaacaggatcagagtttctgttaagttttgttctgttttttaggaagacttttcacagaaaagttgatcagctcatcaactagggcatcataaatgaagagagaaatcaaatgtgcaagcaaaactatttttaaaaattattttgtccacacatacccaatttttcaaccgttttttaaaaaagacacagctatatctttttactgttttttttatggtctgcggtattcctttgtacagaatatttagtgcaaacattagcttatgtgggagaaaatgaatttattgaggttacagaaggggagaattgaaatatgtctcaggatgactcacttatttgtttatgtttttcattattaaattttcttcctttttttttttttttaaacagtgtctcactgtgtcatccaggctggagtgcagttgtgcgatcttagctcactgcaacctctgcctcccaggttcaagtgattctcctgcctcagcctaccaagtagctgggactacaggcatatgccaccatgcccagctaatttttgtatttttagagacggggttttgccatattggccaggctgatcttgaactgacctcaagatatccacctgcctcagcctcccaaagtgctgggattacaaatgtgagccaccattcccagcccttcattattaaatttctacctatcaggccgtaaagaactttggaagcataggcagtattttactctttgaataggatttctctcttttgagtttttaaacttttctcaggcatactgcgctaagggctgcaagttgaggatctagataatgtaatgtatgttcttatttaactcacccatgtgattttcacagagaacatcttgaaatgttattgattcaacaaaatcaaggaggagaggattggggaaacattttcttctcagtgaatctattttaaagcactggttttgttgaaaatgattttttgaaaatatggattgcagtcagttttcatgtaaaagtcaaaccctgacgggtttccttccagttctctgtagaggggatgggatcagctggagtagttgaagacaagaaatagccatcctgaaatcagggtaaatttacctggctgggctgtgaggaataggccttgtgagtttcacgggacccctttctgaggcattagataactttattttcctgttgaataagctctccagaaaaaaaagaaaaatgagaacttcaatggaactggacagttgccaagggcctccctgctttatttccatgcatgaatgtgtgtttcttaccttggaaaggaaagtgggctgagcgagctaggcagtttctgatagacttttgcaagatgcaaagcccacccactatcctctttgaacttcagtatttaaatcagaagaaaaatagctttcccagaggcttcagattattactaaatattgtgcaaattctatcatttggaatgtaaacgcttacactctctgccctttatacctccaactgtgccctcaaacacattttcctgctctagccaaattgactttcttacagtttatacagtttagtattttccaaccaccttgccttggttcaaactgtgtcctccacctggcatgcccttcccaccctctactgccactccttagtctgttcagcatcatgggtcaagtgccccctgagtgccaggccctgtgctccatctggggatatacgggacctctctattcatcctattcttgtttcaagtcgtcttctttttcttcctttctttttttttttttttcctgaacaattctctctctaggacttaacttattgtctaagacatttcatgtagccctcccttgacattctcatgcaacatcttttgtactgttgcatttatgtaacttatgagttcgtatattcgtatttaatgcaattatctaatttctctggctaggcttgtggttctctcttattgtgcatctttaaaaagattttaaagaaaagaacaagaaaaaggtatgcccgacattaaactcagagtcattacaaatcagagccagaagggtctcatacttaactaatgctcatccccccaggaaagggaagtgtcttgccaaggccacacagttgatccaaggcaggcctagaaccccggggctcctgatcactaagctgtgcttctcccctttgcaacatcgcctctgtagctgctcggagctatttattgggaacttttcagggcccagcattgtgagagactcagtgatatgtgaactccaacagaggagcttataagcctagctgggggagtagaacacattagaattgaacacaaattataataatgcaaggcatgagatcagaagtgccaggggattttttaaagaaaggagagaattgatcttgtcataatcatctgggaaggccccctggaggaggcagcctaggctgtcccttcaagggtggtcaagtagtcaggtgaaaggaagacatggtgggagagcctggtgaaggagtcactgcctctctaccccgccatgcctctgccccttcttctgtctcccatgtgtctgcacacgccgatcaatcccatgacctcccagcagaaattcaagggaaagaaaagaggccctcacaatcagacggcgtgaatttcctgtaatttagaggaaacagtggggttcctctgtccccatctgtctttcatttgttcttgccctgaatggttccagccttctccaattgaggtccgtttaaacgttttctggcttttcttgtttttatgacatttggcaaaacctaattatttgacttgagcacttcattggggccatatgaaacaagggacaaaggtgacagttgaatgagatgcaaggctaggggtcaggtgggggtgggaatgctcaccccattctaagtgttggttagcggctcaattgcttggggaaggagagagagtatggacccatgtgaattacaccatgtccaaatgtggcagactggtgtggagaaggacccagcagcagagaactctcattgctctgactcttcaaagccaaggcaataatcatgggtagcatttagaaagagctcaccaggaattcttttaagtgcttttcacattttcagtcaattctcacaacaacctattagataggtactctaattctcattttattggtgagaaaactgaagttagataatttgccaaatacctaggttcagacccaacaatgtggctttaagacctgtgtggttaactcttaacctctctacccactcaatgtgagtaggcatttgtggagggatatcccatgccttaaaatctttatttcggggatggtacacttgagtgtcactggttccagggccagaaatgcaaacatggggtgtctgccctatatatgggggtacagtaggcagcagtggggcatttgagcagctgataagctcctgccccaggagaatggcacccttttggaatgaagactcagtcctctacaagatttttaattagaagttagaaatccatatttgtatggacaatcttcagacttaaagattgtcccacatgtgaaatcctgtgtatcagcagggtggtgccaagctcagcacactggggacagtagttggtcctcaggctgtcagcctgcagccccctggttatgtcacataatcccaaagcatctccgaaatttggtgtccttggtccagtagggatcacagtagatcgtaggacattgaggtatggagtaactggtctgagatcagagctctaaagagggtcagagctgggacttgggcaggtggactgactcaagaagctcatatcctcatgctgttctcactcacaggcagaattctggcagcaaatgatctgaattagaagtcagccgacctgggtcctgggtcagggtctgcgtatgagtgcagctatgacgcaaaagagggtgaggccagagcatccccaagccgcttccagcccttctgttgcactccacaccttgttctccaatgcattgaccagaaaggcccaccatacactagcattataaaatattgcacaggatgtgtccgaggataaattatgatagcatacagataaagattttatagttcaagaacatctatagaaggtgattatgcccttaagaaatatactaaatgctgtgtttagtgtaaagtcataatccacactggtccttacctcccaaggttaaaagcatactgtatttctaaagtgttctggcagaatattcttcgtcgggcacctggcttgcactaaaaacccatgcattttacctttatctgagtttgaaagaaattatcagtgcacccatctggaatatatattagaattctagggggctcttgacaccattggctcaatggaagatatggtatttccggatgagccaatagtaataatgttaataataatagtggtttgtatttatataacatcttatggtttagaaaacagtttcacatatacacaattagattctaggctggtctttaaatatcacaatcattggggcaagcattaatttaaagaatgtaaacagcaaagtgaaaatggaaatgaaatgtgattgacatcttctgccagtcatggctatttgaacctgtttgggggtggggggaaagaaaaagaaagtaacattggtgtcaaaatatgtaagcaaataaaaactttcaccccaaagtggaaatgtaaatcaacattgtgttaaccaggaggatttgatgtgggatgtgaaataaagtccacgagagacctgaccccagctctcttttctgtttctcactctgggcaggtggcaaatctcagattcctgaggcagcatgatcttttctccactccttgggatgcctgacaatttgtaaatccacgaggaagtgtttgttgcaagggccttccttaacaatctcatgcaaacagcatgaagtgatcaaaagaaataagtcttgtgttagatttgccttgtccagttctgtggggtggcagaaccagtacctcaaacacctttgagaaatggtgttcagggctggaaattgggcgaggtgagagaagcttttgccctgggcaccaaatttaagaggagacccaaaacctcaggaatcaagataaatgatagtttcatgcaatattttcaaactatcaaaataaaatattttcaaaataatcaaaatttaaaaaatccaggatgaacagaatgtcataattttaagtgaagacagtataaatattgatttcaaagctgacatttaagtactgaattcactaggggtggaaacaatgaggacaccaggaaactagcagctgtagccatgggtgtgagcccttccagggtgccaggagcagtgtttggtatcttacaggcatttttttcttgatacacatcgggggacctgatttgacctacagtaaatccaaatctatttgattataaaccgtcttagaaaaagagttcctttacaggctccataaattccattacagtccactttgtctttgttaaatgtatgggttggaaattacaattcttttattcacaatgatgattttagacacacagctcagaaagatcagcattcacttaaaaaatatattagcatgcttgtatctattaagcactattgctttgtaagctccagctgatgattttattaagtagactgcaaaaggggaagaaaaatcaaggataattataaattcataaatacataattcattggcataaaatgatttaatggaatggatgtggaattatctatttcctcaagaaaataacagagatattctgattaagcctataatcttgtgtatgtgaaattctagccaaactgatggggcacattttcttttctgaaactacctttgataagaaatgcattacaaactcatcagtttggcttcctgttaacaaagagacagcagccgtctggatcattctggattcacagtgaaactgccacaccatgtatcctccaactaaagctgtgcaagtttgacaaggggcagatgaatccaggagttattgtgcagaggtttaaatctatgcggcagctgacggttgaaataatcatctatatatcgctctgagctagctggggaaaggttgaagctgtatattttcaacatatctagtctaatggttaatctgttgtcttgtacggggctctcgcagggtggactggcagcacacgctgacagcttcgaggaattgctcacggtagatgtggttcgccttgctttccaaagtactgggtggatgaatctaacttagcttgagttggaaaatgtgaaactcacctgactcatgacctcaaacacgagcggaccagcagggctaatagcaggttgggtggtagggacagtagagtcactaagctacctctgttcctcccaatgtccccagatctgtgcacttcaggtgggctccacgggtatttcttttgttatttggctgtcttggcaggttgggaagaacattgttctttgtggagactggaaagcaagggaaatgtgagaagattaaactactgcaggggtcagcaaactttctctgtcaaaggtcagcgagttaatatcttagtctttgcaacccatatggtctctatggcaagtcctcaactttgtcgttagagatggaagcagccagggatggctggtaaaccaacaactgtggctatggtctgataaaattttatttatagccaccaaatttcatatctttttagtgggttaccaaatattattattcttagattttgtttccccaatgacttaaaaatgtaaacacactcttagctcatgtgatgtacaaaaacaggtggcaggctacagtttgctgacccctgaacttgagaaagatgagaaagaagcagctgttggtgcccaggatgtggcaggtttcatccctactctaaaagttgtccctcacaaacgcggactgcaagtgctagggcaacctaaaggagtcaggtttaacttttgccacaaagccgaaagttggcttttggtgtcaggagtagggagtagggagagaaggaaaggaaagttgggaggggctgtttgtattggacttctatacattccccagccctcccagttggatgtaaagtaaaaattatctcccatctcctagtaccttcccattctccaaaccccatagcaaaaattcagggaagttctcgaatttttcttttcaattgtgcatttcctcttagaattccatcgttcatctctgtgtctcatctctaagaaactaatacctagtgatctttgcttgagacttttctttgcccttgaggtaatagagagtctattccagggaaaaagaaaagggctaaaggcaaccagaaaattccaaaaggattttctactgaatactgaacagggcggagtgttgggcaatgattctaacaggtcaagtctacagcgaagatatatgagctgcgattctagatatggggggctttggtacatgctgagttcctctcaggatgcatacagaacatagtttgagattggggttgagggcctatggcatgggtagcatgggcacatctaatttacccaattggattctagaggatccattaggcccgcagtattttgtagagaacactgcattccatgtcatgtggattctgttcatatatttatatagtattttttttctctctcctatggaggagctgaattctttcattactctgtgttgatggactcaaacttacacaattcaggtttcctaggcagtgaatagagccagaaatacaccctgtgattaacttctacataacctattgttccttaaagtctccctccccattttcctattagctccacaaaagccagaaatgcaaaagctccaacaagcctcccttccctgccctggcagcctaccatggggtgggcactccctatgcctgtcctagggcagtacaggtcacttagacattttttgaaattcttattctgcataacgatagattttttaaaaactgatacccattaggttttccaagtaaatgtgtttcctatttcctagctagaagttgtgaaattatcctgccagaataatgtatatgataatgtggttgtttgattttagagaggtgtatatgtttgagatattatgatcgttggggttgcttttaaggggcagcatctttcttcttttcctaatctgtggattaatgttagccgtgatgtcagaggttgcagtgaactaagataacaccactgcacaccagcctgggcaacaaagaccccttgtctcagaaaaagaaaatattagccacgatctttcaaaaaatagatttatagttgatttttatgaagaatactgcagtgcttatcaaacttcttagtgatatgtgctattcaaggttgtcaggcaagaaactctcattccaaggacatcacccactttaactcccctgcaccctgatactgcccactactctctgggcgtagaacttggctccattgcctggcttgcctgatcctagctgtgcttaatagctcagcctcgtcgatggacacatggcattccccaccacgggatccatcccgaaacagcagtcaagtgctcctttacaggaatcatactaccaaattcacagtatgggttgttcagctggcatgtattattatttttgtggttgttttcccatcatcgcttaaggaaacaaccacaccctcttacccgtctggttcgtgtgagaaacagccaggcaccattccatcctccaatccagagactgcgctcttgtggccatgccgtaagactttgagagttaacttgcacaaactttctggtgaaagtcttaaacagtcatatcagagagagcttaggtcagcttgggagttttgttcatggtgaattacattttgcaacacgactgttgtaaaattccaggaattttaccatcactccatacccttcattttagtaaaacaacatttgaaacacccacttttcactggtgtcgctgacggccgaaggaaatgccgtggatctgtctttctgaggagtggcaaactcacggcatttaatgttaggcactgataccacaactaagggggctgaccaagccggcagttcgagacagacagcaaaagtttatcaccaaggattgatgactcggaatataatgattattcagtagaatttgttttagcagacttcaggaaagaatgggtctgatcctgctgctaaactgagttttcggtgtctgtacatgttgtggggtgacggggaactcagtatatttttggaaattataccaagaagattgtcttctgaatttccagaagtattatccctactgatacagatgacaataagacggcaaaaagaattgcaggaagtcatcagggtaaaagaaagggaaaaaaatggcaattcagctgtgagggagaaacttccagtttgattcaaagctattcaatgttaaaattgtttggaacttttctaaaagaaatttcactatggattaatttccattttcttttctccttattgtttggcagtcaaggttgcagctagatcacgctattccaaagatccatttgagttcaagaaggagactcccaattctcggcttgtgaccgagccaggtgaaggaagactgggacccattcccatttttaataactaccctgcagccctcaacattctactttaccatgctgagctcagttgaagaagagcgatgcactactgtggatttcagcttgcacttagcttgttgggcagcaaaataccaaaagggaaaaccgtaaaaaacgattaataataattaaaacgacctcacccccaaactggcagcttgtgcaagacttcagtcggaagccctgttagctagatgcctttgtgttcaaaccactttgcatgactcttattctgagtgactccagtgtgaatatgacattactaatgacctgctaagtgtgtacagatgtgggtttctccagatgtggtgattaataacataatggagatagcggttgactcatgtttatgagttgtttgccttttattacgtttctgagtttatttgctttgaactgttttttaactccagccaataaactcacctttaaatcttaaagggcatcatccccttaaatctcactggggaaacagggcagagggaatgtgccccaggctagagctgagcatcaggtccatctaatgcaggcattagactgaattagggaaggctgggagttgcaatcattgccccatttcactccaaggaccataaagaggcttggtaaaccctgacacagtgtttgcagtctggcgcggctgataaaggaagatatttctttttttaaaaatctagtgaaatatgtaatcattttgaagtaagcccagagttctggccagtgtttctggaagacgttgcttttgcttgaaaacagaatgctgatgaaaagtcgagtaaaatgttgttacagatgttcaactctgcattaaggctgttggaattaccaccacatcttaaatcaattctcagaacattgtctggaggttatgtcattgaaataacgaatcctctttagtcaagtataagcaaacatgttaaaacatcattgtaactttaaattaaactctagcgcaaaccaggggatctgaagcctcattagacttgcctgacatttttctagcactgagtcttcccaaactgtaaaactgttagattcagtgcctattagacaagggagcgctgggaagttacaacagcacattaagtgttatacttagggatgtgcaaaaacaagcccttgaattttatgagtacttggagactggatggagttcagctcctataaaattccacgttagattcctgaacttgtttgtgttctaaagaagtcaggtttctttaaaggatcatatcttcatgtggcttccgcagcatgaaggcaagtgaaaatgccatagatggaggtgtattgtaattagccaaaatgtaggttaaataagagcttgtaaatttgcatcgtcatgaggtagtggcccactacttcaacacgtttgtctttcatgaaagtgagtaaatttaagtctcccttttaattccatttttattcctctcatgtagtcacagaagccatgaaatgaaaattatattttatagcttaactaaaagttttcctagatctgctttctttatgcagaaattgataggatccatataaaggctgataattaaatatggtttatatcctacttatgagaaagaagttatcactgcttctcttgagggacctaagccatatgtaatggtctccattacacagcgttcatatatttaagctggagacattttcccccatctcttcagggaacagatctgcatttttaggctgtgagtgcaggaggaaacctttaaacacaagtttcattttggagaacaaatcccactttaaatgcagtatgattacgatggatgatctttctgagttgcaatgaaaataaatagtttctttgcatagaagaggcataactttactaccagaatgaggtgtctcccttgagctggctaacaggtattaacttgcaactctcccatctgaagatcagtgtagcaacaaggtgtaaagataatggccacttaaccaaagaggattatttgttataggcccaatgcaaaaagggaagccaatgctcagcaaaataatcccacaggcatgctagggaggatgacttctgttcaggtcttaactcatctagattcattgtgtaactggacacaaccatggtagcatctggtgaccttgaaaaatgctagccgtggtagactaggttagataaaaacctttggatgtgggattataaccttaagaagtctaactgaattataaccttaagatgagaaaaacagaacttgcaccccgactagagtgactcacatgcactcacacaaacacacacgtgttatttgctccagcatgctacacaaccagtctaggtcaccctgaacacaatacaccaattgcaagtggcccatattaaaagatgaccttgtcttatacgtctagttagtgcaagactttctacttcattctaagatggggaaagtgcgaaagcatacctacacacacacacacacacacacacccacacaccctcgctgcctttctaccccattattgcctcagatgcctggtcccctatcctgtgaaaggaagatgaattcaggtcaagctcagagtgcctgtttgcttgccgagagatgcatatcaactctaagtgattttttcaataccatttatgtggcttgtatttatttcctttaatcttttaagtgctgtttagtctctgtgtgatttgctttggatactcatttctgataagatgcgatatcatcccagccacatagtctctgcctggagctctaaatgactgatacagtctcggcctgagcttgggccctggtgggtgtcagaggaagcaggtggtacagggggtcggctgtgggtgtttgcaggtgctttcttgccttcatctcttctggtctcactctcaccttacaccacagtcattcccttttcctgcatcagccagggtttagacaagcccaaactgacagcagaataggagagtgtaaaatgtgtaatactttgaagcaggtttggagggtagttggattattaaaatagctttggaagcatgtatcataacctactaaatttatttagcgttttcagggaagtaccatataatgcatgctctaatatgggtcttcctggataataccaagtagctgacatggcactttctcccccatctaagactcctacaccattaacatatatcaagtctcttttgatgtcatcactgctaatatttctcttcttagctttaaggtaactgctgtgcattctgagtttcagggtgctttcctcctagtctgtgttgcagtcaactataagaatccaaagatcttatttttccttcttgatattacagctttagcctgaattgtgggggtggggagaggaggactagaattttgccgctgatgcccctgggtgacaggctgggtttgcatctgctaattatcaagcagttctcttaaaaagaagcatgatgcaggctaatacatctgcaaagcttattagtgggtgtctttgggcaagagcagtagagtgtgctgtggtgtttctaagtgaagcttcacattgcttagcaatctgtgtggtttagacatttggaaaacagcttttggtttccaatcccctgtgctgccctccatccctgccccgctgctgcatcatcagagatttcattcaatggcaacctcctccttcattccggggctctcctccaacctcaccagccccggtgctcctgtcttcatgggttgaaaaaggaccccgttggcacagccccacaagccctccctcctggcagttggagggataagagctgagttgggctggggattattgagccagcatgcaccaatgtgccccgatctgattgaaacattggctgtcaaggccttgaatccttgcctcttttcaacgctctttctctggtatgcaggggttaggaaccagctaagttggttcatctggagaagcagcaggctggcagttatgctgacatttcaaatacaactttatttctgattttggttacaacaaaacgcagtctattactgggcaaagcaaagtaaccaaaattaactctaagaataatgataagtattttttttggtatacagataaatcatgatttcttttttttttttttttttcttatggcagggtgtttacaaactgttttagtctgtttaaagtgtatgttcaaaggctggagtgtaaagaggtgttgccttcaccttctctaagccggcctctttgactaacacatttggtctttgtcattgggtcctaaaagacagccatgaattcctagtgagtgactgagccttgagtgtgtgtcctttgatattttgcctgtattgcacagtctgccctcaaactgttcataatctcatgagctgcctgtatttccagttgaagatgagcagccgtcaacactatcaccaaaaaaaaagcaacggaatggaggcatgcggaactcacccaacacctcgcctaagctgatgaggtaaggagaggggctggttgcccacggtttccctcttagcccttctcttcctcccctcgccctctcctcaccctgccaggcccagagtctcccctccccagcaagcccggggtgggggaggggagcgagatcgttagatggcttcttaaaggctggagtatttattctgtcagcttgtcagcagttaatgatagagctgaaaaaattctgtcatgaaaaacagtttgaaaagctgtttgaaaaatacataggctttaaagtcttagctgtcaccatgtcctgtctgtgtgtagttcctaaacagcagtggcactaatgatggcggtaaccaatcagagaaactcgtgtggttagtttgcctgcggcagtctctttctgctggagtccctccgaggactgttttctgtacttaaggccatatgtgagatgtatcatcacaatcaaaaatgaacctgaagattaccttccttttatcctgtcgattgaaatcaaatttctgttaattgattttgactgataagaaaaagtctaataatctgtggacttgccaaagcaaagttcaaaagtaatccagttctgctcaggctaaaagcaatattaattatgaaatacagcatgcatgtacatgttccctcctttcctcccttccttccttccttccttccttccttccctccttccttccttcccttcttccccctccctccctcccttcctccttctctctctttctccctcacttctttcttgactatggcttcctctggtaaatagcaagtgaagtcaaatttcaacagcgttctgcagtttcttcttcttggcctatctgtcttttatctcccctttttgtcttcaattcatctgccaatcccagcatttttttcctccgacatcctgactctctaccacccaaatgaaacaggagtgatttcagatttgcactgctcaccctatgtggtttctgctctggaaatgcctgccatcttgacattagttttgtcttttcatggccaccggctttgatttttgaaatagaatagtggtgatttccactccccatattcaataacatttgcatgttcctggccctccacatccacctttctggaaaataggcaagggcagtctttcttcatgtggttgaggacacaggttttccgtggaagactcaccctgcccaactccttttccatatcaccatctattcctgttaaatgtttccttaaaagttctctgccttccacttcacccagccttccttgggtttggctgatttgcatgcttgtttacagtttatgaggaggaataaaatgtgccaactgccaagcttttcgtttttatgatgccagtgtcatgctagcattcatttcctatttactcacctttaggtaatcaccttatctaattctaatagttattcccatttaaagtagagaaaagcccagccactttccttcacctaaatttagagaagcaaataaataaataaagagaagtctgaaaaatctgaaacctttggagccaaattccctgtccctgtttgctatgtaaagtatggctcatttctttgatcttgagtaataataattctgaggagttatactgttttcatatgcttcaaagctgtgtcaaagttttgctgcttaagggtacttctttattctgttggctcttgggtaccaagatgacaggtcttctgtatgaggtggaggcttttttaagtcgtagccttcagcaaaacatcaaattaccaaatccagggtaacatacttctacacaaatgcctttcctgtagatatattataccatatatattaaatactttagtgttacacgctacattttatgtgcaatagaaagtgatggtttgaggtagccttggggggactttttttccacaagcagaaaaagctagtgtatatcgtatcaagtatggtttttacaggactttctgcccgaaggcctttgtaaataagtaatgatcaacagattggctgtgggtttttgaaaagcatgcctgtgtcagtttgcatgatgggggagaattttcaaagtggatcttgctttcattcgttgctggagaggggctgagggaggcagtcatcctgggctggagctgtctgtttcatggtacatcaaaattgctaaacgtgggtcaggtggtgagtggaaacttgccaagctacagaactcgggcttctcatgttggttgcctttgggctgctgctaaggcctcagttcctgtcgctgggatgtcttatcccaccagcccaccatggtctcccttcgcagcccagctggaatgggccatcccatgacaagtgagaaagtcttagacactcctcccttaccacgtctttctatgtcccaggtgctccacattctccatctgacctgggagcaaagatggacccctcctgagccctctctccatatcccttgacttccagtttacagaaagacctcagggccctttgttttacatttgaatatctggcactggcaatgaagtcatgggtccatttttgctaaaccccctttgttgattggcagaaaacaagggctctcccagctccctgtggcttttccagttgcccccgcctcttccgacacctgctttctactctccagtaaatgggactttcaggtcctattcctcatgacctgaaaaatccataaaggaagctaatgacttatttgaagtggatttttcgacatgagtttgtgacttgcagtttgagcagaatcaatcattctgaatgcgggcaggttttagtggcctatgggcagtgacaggaatagctccaagaggaactggagaacccagaatgggctaggatgggctgtaatttaccactgtggcttctgcaaataaaacagactcctgcgtgaaggctccttccaaatcatctgccagcaggagatgcaacggggactctgcactaatggtcttttccttccctttgttcttgtatcaggcttaccctagtgtttaagtgtcacttaactctgcacgatcattaggtgaacagccttgttttgtatatctggatcctgaggtagtatgtttttgagtcacctcaacagaaaacaaccctcatgtccagatagagctgaatggcgagtgtctgggccccaggctgaggacacacgtgtaatgatggataaatttggctccacacccgcagaggaggtgtgagccatggaggcttccaagtccccggctctctctgcctgttatttcccttccttcccggtctcttactgtggaattattgaaggagcctcccgtagttttcctctaaaattaccaagcacccgttgcccaattctccctacttagtggggtggtgccttgtaaggatagccacgtctttcctcatttgtaaagtcctaggggggcacaaagtttgtctctaaatagctaagtcaagagttcttaatttgggggccttaccaaccctatgaaccttcaatgaaaactctctaggaagtctttctaggaaaaaataaaaagtacacttgatccccttttaccacagttgaagcaggttaatggattcctgaaatctccattcaggatccctggttacaatcacattcagtttattccagagccacctccacatagttgcacgtacaaatgctttttggttgatgagatttctccaatgggtaggtggtatggagtaaacacctgggttctcacactgaatcctcacatggaatccaaaaagtctgtgcacttcggctgcctgcttttaatctttttctcagattagctcccatccagcaaatatttagcgagagcctactgtgtgcaagttgtcatggaagttctttaaggaatctaaagtctagcacccaaatgactttagatcccttaaagaacttccacacagtctaatagattagattagatccctgccttcaaaatgcttatagtttagcagaggagaagacaagcacataaaaacacagaattgggtaagaacaagctgggggttccactagcatgggctgtgagaatagaaagagctgtcattacctctggtttgggaggctgagcctggtttaggaggaggtcttattgaacctagttccataccatgaggagaatgctcaactaataatattacttgtctaggtttaccgagactggatgcctgtaactcactgagtcctaactacaactctataagtagttattactcttgcccccattttacaggtgagtatgttgaggtacagaaatgtaaagtctggtaaatctaggtaagttttccctaattaggatgatggaagacatagggacagtgctcagaccacagtaaatgcctgggtgtggctatagccaggggtctttggagtggcctagatggagtggagaatgtaagagtattctggcacccagtcatgaaggttttgcttgtcataggcattagggaacccctgaaggttttcgaggaggcggtaacctaacttgtgttttgggggaatcactggtggcagcagagagaagggttgggagtcctccatcaggagatttctgagacacacactacataagcacagaggtgtgaaatagaaggcccactcaaccccagcctctgccaaggccgtttgtgtgctaagccattcagggtctgctgtagaatagtagaccaggactgggatacatagttttcccaaggacacacgtaattcctgacatcagtcctgagacctagagttttcctctaaaatcatcctagttttcctctaaaatcatcaagcacccgtggcccaattctccctacttagtggggtggtgccttgtaaggatagctacatctttcctcatttgtaaagtcctggggagcacagactttgtctctaaatagctaggtcaagagttcttaatttgggggccttaccaaccctataaactttcaatgaaaacttcagtgaaagttaggatttacataggatgtatcaggtggacagtttacacagatagcacccagctgggctggcaaggataattgacaacacccagaaaaaagaaattgaacattttgaggagagtttcatgtcaggagacccagaaaatattagacattagtttcctgaatgggaggcaaaatatgatttgaggaaaacagattatcctcttgggcatctcctggtcattaagtgaaataaactcatctacttgttaagtctcatcacctctcttttgactcaaacctttcgtggggtcattttgttaggacttctcacatcagagcctgctagcatgaaagattttagtaatagaaaatggcaaaatggactgagccaagtcaccctcacaattccttccactgggcaaaagaaagaaggaaggcagggacagcttagctaagtaaattcatctcttaatgcacaaactgatagcatatgacaggcctcccccaggactggagaagaaaaaagtagttggtgtcatggtactgaggcttgggtggaccacacaggtccctggacaagttcatgctcagcagatggtcatgaccttgccctcttgtgtcaagagcatcttgtacaacctcctgtaggactgatgaacgtgttggttctcccaggctgtctcccaaacataaaggcaaccatttccttcttctgagaatgctggctgcctaacactagataacatcttaggtggcagcagggaaaataatgcaagtagatagatgcagagaaattgaaaaggaccctagttctgccagggtggctacagcctggcctgagagttttgtcagtgtggctccagggatggccgtcaagtgggagatggggagagggtggtgggcagtggtgtctcgggggtgatgatcattatcagaagagtggaagccctgttgaaggatgtgttaaggcaggagccaggatttgctctgcaaagcctcaggaagtatcaggaaatagtaatcacccaggagccaaggcacccaagaatgaggcagatccagttggaaccatttatggtgctgaacacccaactatgattccttttgaggagaccacctaaggcctaatccagccttctgtgtctgatacaggctcagacagacccgtgtggcctgatattcttgaacattgtgctcaaggtcttagtgactagataccatgttgttaaagaagggtagaacactgaattgtaagtattgcactttgcgaggactagtatttaatttgcttgtttaaatttatttgctgattagctcatgggaagagaagtcagcaagagagagtcattagtgcagcatctagtcagtaaatccccatcaagaatcaagtgttgacacaatgcctcgagttccacagagtcacagagaatcagagtaggcacccagaatgtgaggcgcctccttcaattttgcaccctaggcaccctcttgtctagctgtagtcctggctttgctgaatagaactacagccttataatctgtgtgttgttgacaattgctaacttgggtaggatttactgaagccatatagattctccatctgggcaaaactttatagtggtggttcttatactttagcaggtgtcggaatcacctggagggctttgttaagatatagcttgctggtccacagccctacacagtctaattcagcagatctggcctggggattggaaatttgcatttctgttaaacttccaggtgatgctgatgcggctggtctgggccacagtttgagaaccactcttttgaagaatcagaacagtgagaggagcttgaagtgatgggggcccatctctaagaagtgttcagactttgcactggagaaccaaatagttgcttaattaagaacatctgtctgaccactgacatgagtcctccctgctgattagttacagcagctggctccaggcgaacttcaggcagccttgactggttagagacataatttagggttgtccttcacatcacaatgccctttttatagcaaatgctctgtgtcctaattcatacgcagtccctgtaaatgaaaaatgatgcaagaaccctgattgttcaaaaacaaattgttgcaagatatcagaggtaaatgggttctcactgcacacgttttggatctccacgaaaggtttgctgagtctctgttgactgcttgaagagtgtttggggactagagatgattcatcagttcctttagttagtttgattgcatcctctgctggattctggaaatacatggaagagcaaaatagatccctgcccctaaatagttcaccatctaatggataaaacagacatggaaattattattgccgaaggagcatctctagaagttcccaggaagggaaaataacttcagtctctctggctgttcaggatgatggctttatgaggaacacttgagccaaactgtgaagtctgagaaatgtcttgttagccccatcatggtgccttacataatagatgctcaataaagtcagtatttgcagctcggataaaaggtctgtggagggatgagaaattcacctccttttaatcaagcctctcatctcccagggagaccactgtaggatgcccttaatttggatgggatgctcataatgacagaaaaggccttatcgtgtgataagacatgaggtctcgaaaatcaagcagagaaaagaatgcaattttctagccattttgtaactttcctttttcataacatttttgtgtgtttggctggttttttgtactttcatgtaaatttctgaagtccagcgttgaacccagtgccaccgaaggaactgggatttgctgtctttgcctgtaagggaaattgtgcactttaaaatatgatatcagcttcctcacagcaggtttgctagaaaagggatttgtggttttgctttaggctgttgtcttcaaggcgagctttttctgttcctgttgtagcagggcatttagttcacttcctgagattaattgatgccaagtggcatttcttgctctgcgaatcctcaaaacaaagatcttttgcaggcacacctcagagatattgcaggctcagttccagaccaccacaacaaagtgaatatcgcaataaagcaagtaacacacattttttttctagtgcatataaaagttaggtttacactcttctgtagtctattaagtgtgtacataccttcattaaaataatttactcctaaaaatgctagtaatcatctgagtcatcagtgagttttaatcttctttctggtagagggtcttgcctcagtgttggtggctgctgtctgatcggggggtggtagctgaagattgtggtggctgcgacaatttcttaaaataagacaacaatgaagattgctgcatcgactgactcttcctttgacaaaagatttctctgtagcatgtgatgctgttggatagcattttacccagagtagaacttctttcaaaattggagtcaatcctttcatactctgctgctgcttcatcaactaagtttatgtactattctaaatcctttgttgtcatttcaacaatgctcacagaatcttcactaggagtagcttccatctcaagagaccactttctttgctaacccgtaagaagcaactcctcatatgttcaagtttgatcatgagtttgcagcaattcagtcacatgttcaggctccacttctaattctatttctcttactttttccaccacatctgctgttacttcctccactgaagtcttaaagccctcaaagtcatccatgagggttggaattcacttcttccaaactcctgttgatattttcacctcctcccatgaatcacgaatgttcttattagcatctagaatggcgattctttttcagaagtttttcaatttattttgcccagattcatcaaaggaatcactatggcagtgatagcttattaaatatatttcttaagtaataagtcttgaaagtcaaaattaccccttgatccatgggctacagaatggtagttgttctagcaggtatggaaacaacattcatcttatacatctccatcagagctcttgaataattgggtgcgttatcagtgagcagtaacatcttgaaagaaatctttttctctgagcagtaggtctcaacagcaggattaaaatattcagtagatcatgctgtaaacagatgtaaatgcctgacttcaaagcttcaaaggacaggctgattcttgttggaactaatgcagctggtgactttaagttgaagtcaaagctcatttaacattctgaaaatcccataggcattaagaattatgtgaaatctactctgcctgtgctctagcaatggaaaaataaaccttcaatttgtaaaaaaaaaaaaaaaaaaaaaaaaaaaacaaaaccataatatctgcaaagtgcaatacagcaaagttgaataacatgaggtatgcctatgttcttcttcttttttttttagacagggtctggccctgttgctgggctggagtgcagtagtgtgatctcggctcactggcagcctcaacctcctgggttcaagtaattctcgtgcctcagcctcctgagtacctgggactgcaggcgtgcaccatctgcctggctaatttttatattttttgtagagatggggttttaccatgttgcctaggccggtctcaaactcctgagctcaggtgatctgcccacctcagccctccaaaatgctgagattacaggcatgagccaccatacttggccatgcctgtgttccttattagactttaggcacactgaatttctagctgtggacactggagggtgagctgagatgcaagggttatggggtgaatttctgctaatcattcacataagtggtgcattttgtaaatgcctgcgatgctggtttccctttcttggctgcttagaacactgcaacttggggtgttttgatggagaatgaacaagatatggctgcctccttaaagtgggagggtatgaggtgggcaccctgcagcactggccttcagccaagtagacctttttgttaaggctttgcctctcctctcactggctgtgccacctgagcatgttacttatctattttgtttcccatgtatacacagagcccgataataacagaaattacctacaggtgttcttgtgagtagcaaatcataaaatgtaggtaaaagttttagtgcaccaacatttggaagtgttggactcatggcagctattcatcatagtaacaacaatggtaatagcactagtagcagcaatagtagtagtattaatagtagcagtagtagaaataatagcagtagctctatatctttattattgaactgctctccctttcctgcctcctttcaccataatcagagctagtaatacatgagtgggtcctaagcaaagtataaaggatgataaccataagactagttaacacttcttgaggacatgctctaggtcagatgctgtattcagggcatgaaatatctttactcatgtaatcctcaaatggaatccattgaataatgctaatgattaacattcccattttacagatgaagaaactaaggcaatgtacaacttagcaagtaataggtgagccaagccttgaagacagacattttggctctggagccagggcgcttaaccactatggtatactgtcactaaggaaataggtggtttcctgcccttagtggtatcaacccctgaacactccatttggagatggactctataagtcagactgctcaaattagctggctagtgttcaggcttcctctttgctttaagctgggctttcattggcattgatcctcaaatgcatgtctaagttaaagacggagagaagttaccactctggcagagcagatctaacatgcctgtatgttggtggtggggtagagaaggtggttggagaggggaaggatattggccgaaaacctttagaggagatactgggtattacatatatatgtctatgtattcctgaaataatggcgggatgcttttttcccccccttaaatggacaagaaaaacttaagattcaagaagggcagccgggggccttcagctaagggatatctgatatattgtgcctgtttttcttcaaggtgggctattgtgttaattttctaggaatgctgtaatcaagtatcacagacccagtgtcttaaacaacagagcttctcacagttctggtggctagaagtctgagatgaaagtctgggagggttggttcctcccaagggtactgagggaaggatctgtttcaggcctctcttcttggcttgcagatctctgtcttttccctctgtcttcacatgattttccctcctgtggaaaagttggcccaaatttcctcttcttgtaaggacaccagtcctattggatcagaactcaccccaatgacctaattttaacttaattacttctttaaagaccatatttcaaaatacagtcacattctgaggtaccggcggttaagacttcacataaaaatttgggggagaacacagttcagcccataaaaatgaaacagcagatatatctcacatcatagagtttctattaccctaaaatagggcatgtacattggctaagtcgcaagtgacaagtgagccttgaattaattatggtgccttttagggaaattgaaaattactttgtgagtggaagacttaggtaatgtcattatgatgtgaaagacaatatctaatcctggtccttgatttcaactaactggtctttgaggagttgtgggagaggctttggaagtgggtctctatcaccttgcaaactgaagatgttgggatcccttgttcagggagatttctcatgatcctcctttccatacaacaaacggcccaattcctctgggtctccctggatcacagcagtgttgattggtgtgctcaatggcaaatgcttggactttcttctagcaatagaagctttagaaactttgatttagtccctgtggacaactgactgtacactctccacctgttccagagatctctctgcagcacaggccagcctaaggcacttgaaattactacagcaacagccatagtaaagaaatttatactgtctggccagaaacagttacagactctattgttgctggaacgaattgtgttcccagcttactcccagactgtgaaatccagtgagtgtgtaacagtgctggcccttactggagccataaattaatccctctcccacgctgcttacctctcatcttcactctagcaacctttctttacctactcagggctctccagccttctgatatccaacaatggtccagtactttcaaaattcttctagctgtgtctttctccagtgacagcacagtgcttcaaaccttcaggatcttctaggctcgcccaacctttatatgcatatgctcactgtatcccttgctcttgtggaatggctcaatgatagaaaacccactgtcttgggcaacaactcatttcatttttgaattactttcaatttttataacaatcttcctgttttggaaccatgatttttgttctctcttaatctcatggatcattcttagtctgctgtcaatcagtcatactcaatcagtttaatccatcttcaacttgactgtcattgcacatctggagacagctggaaggcctggtctgagtcttctgtaccttaggttaggtggtatggtatggggcatcttcagccatggttttaggtgccattatttggcccttttcatttgggcctcaattctctgggtgggtcctactggctattagtggatcaacactgcaacatgctgagattcctcttcatttctcatggttcagatcaaatgctaatttttttttttttttttttttttttgagacagagtctcgctctgttgcccaggctggaatgtagtggcgtgatctcggctcactgcaagctccacctcctgggttcaccccattctcctgcctcagcctcccgagtagagtagctgggactacaggcacccaccaccatgcctggctaatttttttgtatttttaatagagatggggtttcaccgtgttagccaggatggacacgatctcctgacctcatgatccgcccaccttggcctcccaaagtgctgggattacaggcctgagccaccacgcccggcccaaatgctactttctttgcaaaaccttccttaatgctacccaaataccaggatatgaacagcttttttcttggtattcttgtatcaccttgtactttgctgtaacacttgccacaaggtactgtaactattgaactattggtgtatatatatttttttcctgctatcttgtggacctctctttgactagggactttatcttaatcattactgtagcctccattccatgctcagaataggggattcttattgattgctttactgattcaattggttgctttactgattcaataaaccaaagttagaattccaggtaccatgctggtcagagagggtaatgtctttgttccgggaggtttttgatgttcctcaggtcagtctcttgggggaaatcctggattgtttatatttaaatggtccaggccaggatgagagatgtgtggggagtagagtgtagtgtggcatacctctaagacttcctggatgcctctggatgttccattgcaaaccatggcttgagctccagtgtgaaattatgcctggtttctggaaaccactaccccagttaatgaagcttgacattagctgtcttttttctttttattgaagggcgatcgatcatcaggcttgcttatttgcttttctggatgaaagttgtaggccactgttaacaacgtctgactccttcccagaaagaatcaagtataccaaaccaaaatgtatctcctcttccccaaggcacacattttctaaaagtgttttttgtcagcttgctgtttcatttgcttgcttgctgatattatgggaacatagttctgagtatcttttaaatcctaaatgcactaggggcaggtctcaggtcatcctgaggtaatactttctctccaaccagtaaacagggcaagagaatttgaacctggctctatatcttcagggcaagtctgctaatatcctcttgcaactgaaatatgttcttcatgggctggaaagagttaattttgttcattttctcaaacctcttctccatgatggcttttgtctacctacctattccagataatattaatagatatctatgcaactgttaaagactcttcaaggacaaaaacatccctcaaaatgtgctctcaccctgatctgtaaatagttcttatcagcctttttatcttaacatctttgactaagttcagtatttggaagatggcctggtggtttacatacctcaagacctctcaacaatccagacactgagatgctactcggagtgggattgttcttcttttaagatcagatatgacagatattcctatagtagtctagcatgttcgttgaagataactttgcaagttggcttcacatagtatttgtcatttggtgtagtctaaaagcaaattctcaggcataaataaaggcagtgagaaagttttctcaccttatgtgggagtggggagcatattggagggtcgtggtagttattcaaaagcttaatcctaggtttttgggccatggaagagattgctgtcccactctgtactcttgacatataagtgggaagtatcggagacatttcagaaggacaaatagtaaaaagtaaataaaagtcagcctctgcagagcgagactctgtctaaaaaaaaaaaaaaagaaaaaagaaaaaagtcaccctctgatgttgaaatatagaatttcaaaaggtaaaatcactttacaatttatggaatgtgacccgatgtatattttctgtcttgtgttgacaatattactcagaaaagatagctccatttcaagagtggttaagtatagctgggacaatgtcctaattatatggccagttttgcaggaaggaacaatgacttcccaaacccgaggtgctgaatcactatcagagataaaagcatggacattgactatgattcaaggtgcaggagcttatttattgtgctataagcttgttagaactgcctgattccattgcagttcttaaggttgtcagtgaggctctgccaacccactagacgggaggcctttatggaagcatcttccttttccaccaatagacaaggcaatagagggcgaatgttgccctgagaatttgaaacaagtttattaagatgcatctgagcttgaggctctcatctaagatatgcagcagttgggaggtgaaggtggtggggagcatcattggatggttagtgcatatacagttgtcaaggcaaggagagagggtgttgtttagtattgaaatcatgtattccagatgtgggcatttggtagtcagtctgctctgaagtgacatgctgctgaatctttaaaggcttcagccagggagagcaaaatctgattgggcaaattgctaaaatatttaaagtgcagcctgttaaagcttttactgcgaagagcatcacgtcagaagttgtagtcagaaggagcgagtaattggctttccatcctcatgccagtcagtcagcatgaggctctattcctattccttcctcttcattgccgaggctcatagcaaccctttggtgtgtctgtctgtgtgtgtgtatgtgtgtgtgtgtgtgtgtgtgtgcacgctggggagatcgaatagctggtaaaatgagaggaagaggagtgaggtagccttaaaaagggaggctgaatccacaaaatgttaggaagaccatttaggaaaagaggagcgggggaaaggcagaaatgctccctgacaaaggtcacctgcacttccagaagtggggtggtggtttggggcagttgtctctcaaaggatggattctgtaagcagaagaatggccttcagtgacaaccacttcctctgcatctttcacatcctctgagatgtaattcagggggcactttccatttataatttatcacattttccacttaggttttcctgtccttttcttcccaggcatgaccccttgttaattcctggcaatgatcagattgacaacatggactccaatgtgaagaagtacgactctactgggatgtttcactggtgtgcacccaaggagatagagaaagtcatcctggtgagtgagggactgtgcatctgatgttgcccgcttctgccccaaaccacatttgctaggaatggggtttccctagttggacagtgggataatactgtccctggtcctaattatttttgatgagtgaaattctgagcatagattgaagcagctagacctctgatcagaacataagcaatattcagatttttcaatctctgaatatattggctcctcataagagtaggtgagcacttgctgtgggaaagccatggtgggaggtggtatgaacataattcctgtggccatggcgctggtgtcagagcctgcctgtaccaattattagctgcatggcttgggtaattcatttgactttttgcacttcggttttcttatctgtaaaaagatgagatgagaatgaccctaactcatagggctgtagtgaagattaaaatccaacagatgactcagtaaagttacctcttattcttactattattaaatgctgtgaggaaagctgaatgctgcctgtattgttattggtttatagcaatgttttgtattcttatagataatagccttgtgcatctgtgagctttcttagtgcatgttgtagacagggaaatgcatgatgatgcatgacataatgatgacaataatgaactacagtccccttggggaggctggggctcagagccctatttcgtggaaggcttgtgaacatcttcatagcagcagtgggctcacccagtctctcccaggaatgtcagcataggtaacaatccattctactctctgcccttgttctattaacagctttgggtcttaatgcctacactggctttcctacagtttattgtcttgctaatccatgagaaatggattaataatcaggaaagtcagatggaagggttctttctcccttgggcctctaatccccagattggtatgggtctgttcctttttgtcagccaggaaaatcctatcatttctgatgtcaggaccacccttcctaaacaaggactgttctgggtcctcggaatggctttgtatgctaacacactggactttcccctatgctttatctatgtgtatgtgtgttctcagcttaattataaatgagcattaacagccaatacagtatcaagctggaggctgtctcagaggtgggaaagttgcaggcaagagcacagaaagtcagaattcttagcaaacagctgttgtccaactgaccaggagtgcaaattgttctactcgcaaagctgcttcacgtatgtacattctttttgttttgttttgtttttttgagacagagtctcgctctgtcgccaggctggagtgcagagccctatcagctcactgaaacatctgcctcccagattcaagcgattctcctgcctcagcctcccgagtagctgggactataggttcgcgccaccatacccagttatttttttgtatttttagtagagacagggtttcaccatattggccaggatggtctcgatttcttgagctcatgatccgccaaccttggcctcccaaagtgctgggattacaggcgtgagtcactgcacccagccatatatgtacattctgatgtattcatggcacttttgccctggtggcctaaatttagcctgatgttaccacttgtggcaggtcacaggctggatgccgtatctgggacctagggttttaatgacttgcctggatattggtgtagtatgcatgccaactgatattcaatcaacatctcctgccagcataaaaaagtttaaggaggtgagttactacttctatcctatgaaaaataacatcatttaacaaaacatctccaggaggcctactatgtgccacacaccattctagttactggagatgcaatccctgacaacgactgctctcacagagcttgtgttctagcagggtggggctgggggaagaggagttatctctttgtgttctagcagggtggggctgggggaagaggagttatctctaggtagacaaatgagtacttaataacatttcagatatttataggatgctttgaaaaaagtaaagcagcattgtaggctagaaagagactgggaggtgctgtctggaaagtatgatccaagaagccctctctaaagtaacacggctagagataagaatgacaggtagggccagctacatgaggatgctttgaggttgtgtacccactgggcacgggaaactaactactttggggatttgaagatataagagatagtcccaattgtaatttcctggattaattagagagaagatataaaatgtaacccatgaaacagtgtatttaaagctaagtggtaagaggtgcaaaatgctattgaaatgtaggggagaaggactagggtgtgtttaagtgaccaggcaagtcccgtcatacacacataggttgtgcttgggttgggcctggaaggatgcatgggaattccagatacatagagaaatgatcagtttctctctctagtgtgctttaaacccggcaaaatcagacacaccggggctgaggctctagaattaggatattcataaggttctctgggtgatgtagctgtggccagtctgaggatgggtgttttgatcccagatcgaagttcctggggtcagcatctgtgcctcggccactcaactaactgtgccttccccacctccctattctagaattcacttccaccctgggcccagtttatattcctctggcttgttgaagggagctagcctcccaggtgacctggccaattacaaataattaggagccccatcacataacagtgctttatagactggttggctgtctcctggtggcacccaggcacttgcacttccgtgcggcccagataactaactccaggtcttctgcaggaagtggggatatgtgatgtgagctccccagtgggtcttccttggtcacagtttctaaggcatttcttacagcttatgtctccggtttccctggactattgcagagggaaaccaataatggtgacagcccctgctttattctaatgatcagagagtgaaagctagtttcttcctctccttgggggttactgtaataaccctgacattgttgtgaattgcaacattggcatttatacaatcaatgcagtggtcaattctagagattaaatcaagcagagtttgatatgtacagtggacattaatatgcctcccccaaagcattgtaagccacatggggccatccaggcatgcagtgggtggacaggaatgggaggcattgaaccagaaggagaggcagagaaaggtccacggctggcctcctggcttcactagctcagtgaatcaaagggccagcagtgactaaacatttgtatttcctgggaagttggggttctcctctaatagagtgactgtgttctttcatttgtctcctttgtagatagaggtttggagttggaggaagacactggcctgttgctcttactaatctctctctagccccttgtaatgattatttggggagatcttttctctgaatgatttaagcaaaacaggcccctccagaaatgtccctggaaagtccaaggcagcattggacaggggtcagcaaactttttctgtaataagtcatataatgaaaaatttaggtttttcagggtataagatctctgttgctactgattagctctgctgttgtagcataaaagcacccataggcaatacctaaacgtatgagcatggctgcattccaatacaactttatgggaatttgaactttatgtaattttcacagattatgacattgtcttcttttgattttttttcaaccattttgaagcacaaaaacaatttttagctcactgaacatacaaaagaatgtagtgggccagatttggcctgtgggtcgtagttttccactcctggctttaggtagcatgttccacctgctgatgcacggacatctcactgataagtctagaattctaaagtcaaatttctcccactgagcccagtgcaggcatctgaccattttatcatcatctcagcaagcaagccagaaaaggcagctcatttaatcaacaatttcatggaaactaagacttctctttccaaatagcataaatattccttttcctttttattttacctcctgaaaattattatgaaggtctgctcacacatatttatggcatacctttcttaaatcttttgtcaaagaaggtagcaatgtgtatggctatacatttggacagatttattacaaaaatataatacatatacacgtgctcaaattatagctctatatggcatgtatataacattgatgaaataaaaataatagcacatagtaagctctcagcaaatatttgcttgattctttgcacaaatgatttatttcactccttacaacagccctatgcagtcttctctctgactcttacccacttctccctgttgtagactcgaagtgaagctgccatgaccgtcctgagtggccatgtcgtggtctgcatctttggcgacgtcagctcagccctgatcggcctccggaacctggtgatgccgctccgtgccagcaactttcattaccatgagctcaagcacattgtgtttgtgggctctattgagtacctcaagcgggaatgggagacgcttcataacttccccaaagtgtccatattgcctgtaagtccaaggtcacattattgatgccttttcttcttttcattcacaaaagaaaatcccggatggatataatagttgtagctttgatcatgcctgtgcttcttcatctgggtatgggcctgaggactcagcacttcccctatgctctgtcaaggaaaatccaaaccctgggagaccttattaaaaggaatttgcagccaagttcagtccctcatcagggatgaagtttagcttgtatcaagtatattaaccatatcagcgtctaaacactctcactcctgcctatacaaaacctagagcattgttatattatgatgtttatagtaaggatttgcttacagaactatttatagcattatacttatggcatttttaatgcttgaagaaacattgatctgtgccaccttctgtttttaactaaataaatgcaaataacagagttctttatttctgctgtacagaaggccaactccttctgcagctcagccccaacccctgttcatttagaagtccagcaacgtgttcatggttgtgtttgtgtgtgtgtccgtgtgtgcatgtgtgcatgatattcttgactgcaaaacattaggacttcagtctgaaaaaacagtctgggactccacaatttagtgtgaggatatgggatttaggagtcatgtaattaactacttcctaatcataatgaatgcatagtccacaaactctcaaaacattgtagagaattatgcatttcaacatttgatgtaattctccacatcacaaattcatgcaaatctcacttatcctccaaatatttttcttgtaagttcacatccctgaaactgagaaacaggggccaggtgcagtggctaatccctgtaatccctgcattttgggatgctgaggcgggaggaccacttaagctcaggagttcatgagcagcctgggcaacatggtgagacctcttctctacaaaaagttaaaaaaattagcctgatgtggtggcgtgtgcttgtagttccagctacttgagaggctgagttgggaggatcacttgagcctgagaggtggaggctgcagtgggctgtgaaagcaccactgcactccagcctgggcaacagaacaagagcctgcctcaaacaaaaacaaaaacaaaacaagaaacaactgaggaacatggatttctctacatgttaagaagtctgggttttcccccacttacaaagctaaaatgtattatttctgttatcagcttccaaaacctcagaaatggggggaaaaagagccaagtaatataattcattaaagaacacacaagaatctatccacaagcagtacatgttactcattagatgccaccatgtgcctttacataatgcctgacacaatagggactcaataaatatttaaaggagtgagaaaaagatcggacagttatcttttggatgctgggccaaaaacccactgccttagtgagcacaggcagttgaaaatagtcacctatagacaaacagtcatacacagaggagagcataagcatatatatgctttgctcattccagaaatatggtcgatttgattatatgattccatggttatctttctgtcatgtgctcctccacatagtcccctgacctctgaaagtgtctttgtaaagggtttattattttaccaggatacatgagtctgtgtgtgtatgtgtgtggagagagatgggtatatgtgtgatatttggtatttgtgtgtgtgttttgtgtgtttgtgtatgtttcctcctgtgtgaccttttttgtttgtttgtttttgtttgtttgtttgttttgagtccaagtttcactcttgctgcccaggctggagtgcaatggcacgatctcggctcactgcaaccttcacctcctgggttcaagcgattctcctgcctcagtctcctgagtagctgggtttacaggcatgcaccaccatgcctggctactttttttgtattttcagtagagacagggtttcaccatgttggccaggatggttgcaaactcctgacctcaggtgatccacccacctcggcctcccaaagtgctgggattacaggcatcagccaccgcgcccggctctgtgtgcccttgtacacgttcactcatctttcttcatgtatatgaatgagctgtcatctttgcaggtcatttcaaaccctccaaaatttaacatactcaagcacaatagattttcacaaaatgggccttcacctatgtcttcacagagtttattggttaaacagtaccctgcctatagggccagcccagagaaacataagcgatttctatgtatgtcatttgtatttcttgtagtttgaaatcacgtgtgtacaactgcacagggatcatcttatatcacaattacggctggcttccctacaagatgaaaattaaaagaatatggatgcaggcaattgaagcttatgcactggcaaaatgattcaggaagttggttggacttgttttgtaccaagagatcacaggagaagagggcattctccttctctcaaaaagacgctgctccagagcttggaactagttgtgtctcagcagcaaccacagtgctaaatgccccttcctccatagttgcacaatattttagggcctgagaatagaatcatgactaccagtgactcataaaagagggtagataggctccatctctgcagccaagtctctttccaaagccagttctccagaaagggagattagaggaggacattcccagatatgtgacagttggcaaacccttggtctacacaatcagtgagttgaaggtaactcaggtcaccacacaggcaaagaggaagctagattcaagctagaggaccaatgaagctggtggccagacaggagccccaaaatgatgccgcgtggccactggggagctatggcatggggtggcctgatgattttgctgtggcttcacctgaagacacagagcatgtggaggccatggccctgtcctaacctaacccttctattttccctatgcttgcattcccggactctgttgttacttcctggatctgggatttttccactgtcttttgttgttattttttatgttaaaaaatctgtttactggcttatttattttttaaatgtacctgtaatatacaaatatgttcttgttataaaatattcaagcaatatagaagtatataaagtgaaaagcaaactttcccctcacccccacgaatcctatttcccttcccagagggaattaccattattagtgtaatggctatttttcctgtgctttccttccaaatttacatacatttatatatatgtaattttattttgtgggtttttttttttacataaatgaaactatacttttttttaactgctgtagaactttttttttcacttccccctctatcttaggcttctaaaccaatgcctgcatggagagccagctctgcctctttacctcctgcatacattttcactgtgtgcatgtccaaaagtatatttctccattcctatgttgttggacaattaggtcatttccctgtgtatttttttcttgctgaaaatatgcaataaaattatatgatctgaagcttaactcctttccatatctcttttgcattgcacacattaattccactccatccatagcctccaaattgagccgcacatccaggcccacctcatcactctgtgctcactggccatttctccttggctgcattggaactgctgtcttttgcctgagacagaagtgacccgctattaaataaacaggcatttgaaacccacccccttgttacattctgaaagccagaggttgccacaggacagttacttaaatcaagacaatttccaggcaggaagaagatgtagaaccctggcattattcctctcccgcgtttgttagtaatagcttgattgagtattgagaacaagcttaaaatgctgccatcagcaccgactaccctttagattagcacacagctcctattcccttgaatgtagttaggccagcttaatgtcaaggcataaaaaagatacttgttaaataatttcccaaagctccgactcaatctttaatttgttttcctctttccctctcctctcacttttgctcctctctctctctctctgtctctttctccccccatctctgtttttttttctttcctctatgccaaagggtacgccattaagtcgggctgatttaagggctgtcaacatcaacctctgtgacatgtgcgttatcctgtcagccaatcagaataatattgatgatacttcgctgcaggacaaggaatgcatcttggcgtcactcaacatcaaatctatgcagtttgatgacagcatcggagtcttgcaggctaattcccaaggtaaggacagcctgtaatacttctttgctgtgcctgcaggggacaggggctggcaagagggatatccttcactcagtaattcaaagaggctcacatcagcctgcctggcagtgaaacctgcggtcaccatgatggctttcaaaggggcatctgctgcctcttctttccattccagaatgcaggcttgagacctggtcacccacacacagactaggttgcctttccagaggataaacaagcctttaaatagccaccccctcagctttcccaaggagtggcttcatgaccagtgtcatcagctaaatgtcagagcactgaaaagaagctggctgcacaattctgaccgtttccttccagtatatgtttttgccattgagctgggatgggaatgaagctttgctattgttagagccgcctctaggactctgctgaccaagggatggtaatctctggagagtggcaactctatggacactaaaagtcatttagcaaatggtgacacttgtcagaccacacattttcctataggaggcaaagcagccttaagtgacacacgtctgccttcctactctgcccctagtctttcctgtcatttgctttgggaccctgggcaggtggttacaagtaaagatgtctaggggtctcagaaaggcaacacagcaaaaccttcataaaaaatgacctctgtaatcaggatctggcaggataggatgcaaagcattttccattgagtgacacctccgtgtaggctagccatgaattggaggatagttgttacagacgagctgccagagggtggcattggctgcctgatggggaccagaatcccatcagtccaggatggaagggtgtaggagcacagcccatgagagctatggctactgggatatgaagcatcaccttattgatagcttggcaagtgtctgacctcctccccatcatgccaggctttctagaagctcagctgaatcatgcatcctggacctgtgagctacattattttttgtcaacttgacatcaccaccactgccttctaacatttgcttagcattgcagaaaagccaggaacaatagttcctggaatcctcttccctgcatggctctgggctagagtcagctggtgggagatgggcactggggtgagatttggaaagtggaggagaaagataggctttgattctttggaggcaactgcagccagaccctggcagacccaggttcaaatcttctatcagatgagctttctgggagccagtgtcttcactgctacagactgagagaggggctggggcttctctgaggatcttgagattcacagcagcttctggtcaagcttaagagaaccttcccctttggtggtgcatgtgaaatggcttctgtccttctgacatcaccctgatacagcctgaagcctaattttgacctctccatgccaccgtcctccctgccacacccaaatctaaatcttggtatccacctgctcagctgtgcccgcaggacagcacaacatgtgaaggcctaggagaggctctgagcttactcccagctgcatcctgaagaggtagagcccgcatcctgtgcggcctgcccgggtagcacaggcgagaaaggatgtgagaagacagtaagctgaccttctaggagttgaaagaggcaagccggcatttggttcctgcctttaagcccttgactttcaatatgtgtcctctctgccctgccccagtatgggtgtctgttgggggaggctgttagagttacagaacctcatgggccatcccagacctgctgggtcagaatctgcattccaacaagatccccaggcaactcaaatgtgcccttttaaagcacagtaaaccttcacatgaacaggatgtgaccaacccttggtagatgctcctcctctcctggggaggagtgaaccatcaaggggaaaggaaaacagtgaaagcaatgattctccctttaagtacagacagaagccagcaggaggaggcaggaaaacactccctttccccaacatgcctgtttcctccaaactcgatcatgattttccagggccacagattagaatgtcagtgtataatttagttacatacacatctgatatagttgttccttccagttctcttaaacctcatcccagcctcttagatcctatataaaggccaaactggtaacaattcttccactccccggtgcccaaaagccttctttattcttttatagcacaggataagcaagaaaaataggttttgacaggagatatggaggaaagagaaagggagcttatttttcctccaaagaaaaaaagggcactctttcttttgtatacacacatgcacacagttatggtctgaatgtttttgtaccctccacctactccctgccaaatacatacattgaaatcctaaccctcaaggcgatggtattaggtggtggggcctttgagaggtgtttaggtcatgagggtggagccctcatgaatgggactggtgtccttataaaagaagcctgaggccaggcatggtggctcacgccttgggaggctaaggcgggtggatcacctgaggtcaggagtttgagaccacttggccaacatggcgaaacccaatctctactaaaaatacaaaaaagttagccaggcatggtggcgggtgcctataatcccagctactcgggaggctgaggcaggagaatcacttgaacccgggaggtggaggttacagtgagccgagatggcaccattgcattccagcctgggtgacagagcaagactctgtctaaaacaaaataaaataaaccaacaaacaaataaataaagtaaaagaagcctgagagagacccctcgtcccttctgtcatgtgaggacactgcgagaaagtcctcaccagagactgaacatgccagcgccttgaccttgaactttccgttctccagaactgtgggaaataaatatctgttgtctatcagccacccagattatggtgtttgttacaggagcccaaatggactaagaccgcacaaatgacagaagaaggcaaaggatgtgtttctatgctcagcagtgattctcgtagacccctggtcagcagtggagaggagcatctgtctctcactagccagcagtctgttctgctccctaagagagagtgtcaaagctctaggcccaccaagactttatgtcccattgttttcttgtctgtctgtctgctcctctcttgtttttgaatactgttctctggtgatactctaaccttgtaaaggcagtggtccagtgggagccatcaacacagagaaatcgctccttccccagagctcacctctggctgcagacccagcactccactccttgggctcctcccagcctgtgagctgactctgtgagctgagtttccctgcttttctatatctgagacccttttgactaactggagtgcccactggcctgagatacttttgtcatccttcatctgggcatttggcatgatcaagctccaagggaatagggattatggggaacaaaaaggatttcatgttactctccattttttttcttttcttttctttccctccttccctccctccctcccttccttccttccttccttcccttccctcccttcccttcccttcccttcccttcccttcccttccctccctccctccctcccttctttctttctttctctttctttctttctttttctttctttctttctctttctttctttctttctttctttctttctttcttccttccttccttccttcctttctttctctctttctctctttctttctttctttctttcgaggtagagtctctctctgttgcccaggctggaatgcaatggtgtgatatcagctcactgcaacctccacctcctgggttcaagtgattctcctgcctcagcctcccaagtagctgggattacaggtgcgtgctgccacacccggctaatttttgtatttttagtagagacagagtttcactatgttggccaggctggtctcaaactcctggcctcaggtgatccactcaccttggcctcccaaagtgctggggatttcatgttactcttatcattttggaaaacaaatctaacttcctctgagtgataactacacagatttctggccactgacaccttgctttccctcttatgtattctatggtcctttatggaacctcatgctctgcattgtctgaagaactgtctccatgtctctagaacctcactgggtagaaatgtggactcaggacaaatgtcatgctcttgggccagaatatgcatgcaaccctatggaaagctgtcctaagatgatataatttagcatgaaaaatgtgcattcacattgagaaagtagagccttcattggacagctgccactgcatgttattagggctcctagactaacaaagcctcttttttctcttctgttctcttttcacactcccttttgatgtcacttttctagcccacatggtgtcagaactgacccagcctagggattctggaccagacactttctgaaaagacccaagatgtgatggcttgttgtcaaaaacaattacagaaaaggtggcatatcccaagccagatggtatatccgatgtgacagttgggtctatgagatgcagttttaatatacagcaggcaaaactgcagtgacaattatataaagcagatgaagctgcttcttgctggtcagcaaacatcagctcagaaccactttacagctctttaccagcaactaagtgcctttatttacagagtgcctgtcacttccctttggctggagagctggtgtattatttagcacgcatttatctggggaaaacatttcaatttaaatcagctggtacaacagtggctcttgccagactgtttccctgtggttcaaaaagatgagaactgagtctgatcttggaagaaagggtgagcagagggaggcaatgtccgctctctgagctgcttcagttcatacctgaaaagagggagcatgccatggcatttcccattctgctttcatattgttttgaaatgatgatcttgtagttgcttcctgcttacccttccatgaaaggtaactcctaaggaaaagaaaaaggaataaatggctgttctccatgcatcaggcactctaaaggcccagaacacaaaggtgaccaaaggttgcttggattcagccactcactatgcttgcaggattcaggtgagtggaggaggtatccccataaacaatgacagtccaaggaaacaaggacgaggctagaaatagaggaacacaaagggatccttggtttaggtattttgaggaattgagaaggctttcaagaagaggtggcatcggccaggcacggtggcttacgcctgtaatcccagcactctgggaggccaaggcaggtggatcacaaggtcaggagatcgagaccatcctggctaacacagtgaaaccccgtctgtactaaaaatacaaaaaattagcaaggcctggtggcacgcccctgtagtcccagctacttgggaggctaaggcaggagaatcatttgaacccaggaggcggagcttgcattgagccaaaatcatgccactgcactccagcctgggcgacagagcaagactccatctcaaaaaaaaaaaaaaaaaaaaaaaaaaaagaagaggtggcatctgtggatgacttgaatgcatgtggctatggagcacttgaaatttaggaattaaatttttccttttaatttaattttaacaaatataaaaatttaaagtgatccatagccagtggctaccatattggatggtgcagtcctagagtgtagacttgtcttgctaagggtttggatttgggggagtcatcaaagatttataggaaaagagtaattaattccatgcttgaaaaagataacaggtggaggcaaagtgagctggcttgagacggagcgaatggaagtgacggcaaagattcctggggatgtgttagagggacagggacaagtacaatttggccccaatacagggtacatataaggcagcagggagagatgaagttgaaatgtgggttgggcattgaggaatttcttttctttcttgagttaggaagctgtaaataattttttatgtgtttatgagttaggaagctgtaaataattcactaggcactggggagctacagaaggtttcaaagcaagagagtgatgggattggacctgagctttagggagatggatctggcagccctgtgaagcattgtttggagtggaaaggaagaagatgcaaggactctggttaggaactgtggctatccagatggaagcctgaaaccttggactggaaaaagaatgggaggttctagaaggagtcactgtacatgcaaaacagtctgcatggatgtgtgtttccttctgggggtcagaggatggcagagtggagggacaggctgcaggagaaagcagtgttgggaggattgggttttagtcatggtttatttccacggggacttagtggaaaatccagatgggcatgaaaagctgaagggtggaaatgaagtccttaatccaggaaaagtttgcttctagcaatctggcccattgctcatgctctaggagcaaaggagagcctcagagagagggagagaggcaagagaattgcaggacagaagtataccatctcagaaagagagggtagaggaaaactttggtagaagccggagaaccaaaagctgagcctgtcccgaatgtcccaggggagggaggagccaagatctcaaacccaagacatatgtccactgccttttttccatattttatgctttatagacacacagacacacacacacacacaaacacacacacacatacgcacacacacacacagctttcctcccgccctctttgacctgaagctatagttacactaaatgaacatccacatataagcggacaccctcctttctccacatttcaacaaaggttaagagcctcaagtagggaatgacatttttctttggaagtatggcagcagtccttggagagatagcattaattgggggcatagggtacaccttccctatcctaaagtctgagatgtcttttactgttccaaagaagaaaatgtgatttctcttttatctttgtgtgagacagtgtggattaggatctctaaattactggatgacaaaaagcagaacgaaaagggccttcctaaagtggaactctgggatgaaatccacaggacagaatgcattgaggacctctgcatgttaattttcaaatgatcagtaaagacaggctagataaaccttggtgataaaagcatcatttcttttgagcagtgactgtttcatctttgttgggataggagggaatgtgtcaagagctgtgaagatttgaagcagaaatttgacaaacaaacagaaaaatgttgtaaagaggacggccagaatggggcagtgcctggacaacatgtcacttgccaagtggttaagagaacaaagccagcaggcttaaagggccatttaatcttctgctccattggacaaaaaccagggccaatggttaataattaaggagaacaggattttagcccaacataaggaagatatttccagaacagcatggacagcctgcaaatgcagcgagcctcctatccctgactgtctctttgctaaaggagagttactgacacgctctttgtgatgggagggagattggtagagagatgagttctgtggtcctttataactaaggatatccagcatgttcttgatttttattacatagggatctgtgttttatatgatttgcattgtaactccagagggagagctatggtgtttgtcaggattggggtcatgagtcttttagtggaagcattcatgtccttcctgaacggcactgtctttgtgttcaaagatggggagcggacggcattggggtgagcagctgcagatctggcttttccattaattggacagaccaccccatcttcaacttccacaccacccttccacacctgcctttttcccagggctctgccttctcccacttctacaagcctggctttcctgacccccaggctgctcactgtttcttgcagacgcacctatacatgtatcctcacacacatttcccctccttgaagtcagagaagaattttttcagctgctcccatataacatttcattaccacaatattctctctcaattctgaaatggtgataggggagaagccatttctctttatacccactaaacgaacaaagctcagcgctaaaatatttttcttccattgtaactgaaactgctgttggcttccgtcccaaaaaccagaaagacaattatacttaactgtttagagatttataaataccacactggagtagcctctaggtagtaactttagatatctaccccaataattttcttttattggtttgtgatttagatcttatcttgagtcctctataataagagtagtacatttcattaaaagagcttactaaacaataaagaaaatctggcttagggctctgagcagatctcaagtacagaaaggggcctgccctgttacatttcttccgtggacatcccaagatgaatctcatcacaagaatctcaggtgcagatgtatttcagcaaagcagcaattgcagctgttttctaaatgacttcaacttaagagaatttttcctatatagcatatttcatcacatgagagatcctctttaaccctgccatttactattctagtaatgtattcctagcaagagaaacaaggaaaaacaacagcagcagctataataagagactgagaaacttggactactttttgaactcatggagggttttatgccctccatgcatgaaagactttcttggagagtggatgtgcagaagaaaaagtaaaaacagacagaatcatcttttccttccaaatggatgcagagcagattcatgtccccactcaggctgtgcccggcttgtgacaactgtcgtgaagggaaatcttagcttcagagacagaaagcagattttgggtggtcttggggttggactgaacttatggttttagcatctggctctcacatgccagtttactcctcaaaatttgtgtgcctggttaatgccttttttaagaaaatgtaatttttttttcaggtgagccatacaccagacacattcctatgtaatatcttatttaatctccctgacaacctgctgagggagagttaccaccttcattttacagttgagaaagcagagattcaggggaattaggtacctttcccatagccttatagctagtcaagggcacatggagttgatctccaaacatctgatttcaaagtctatgcttttctcggcacatcagcctgtctcttaaaaggcaagtgttatcctgatgagaatgggcctgaagctatacatgtactttcaagggtcatgggggcacccccaggacaaacactcaaggggatgaaagtgctcaaggtgtgccagcctcacttctaaactggtccttgcacctaaggggctgaagtttgttttcaacggttcttgtctctgtgaatccccattttttgagccccttgaccctagctgttccaacaatgagagatactaggattctgttggcttcagtctttcttgctactaccactggacaaatgagtaaatctgggggcaatgtgaagcactgtgcttagcctgtctctgtgaacagtatgactgttggagtctttcttttctgtttttcttgtgaatatagatgggacttcggagctgtaaggaagagagtggaatatttgagacctagctgttactttctttgtgaagacacttaaataacattttcaggttttatttactccttccatgctcaagcggaagtttccgtgacagcagatgagaatgaagagaccactgtagcgcccaaagcctaggctcagaaaatggtccagagaaattgtcttatagtggggaaaccacagctgtagaatcagagagaagtaaaggaagtcttgtaatcccatggaccctctaagacacctcatgaaattctggataaggataggtcaactaccttatcctgcatgtcagtttggtttgcatcctatgcatgaggttagtgcccctgttgtctccatagtctatgctgtcatagaagtaatggggtctacaggcaaaagggacagaaacataaaataagttgtatggaatgactttgacacacatacttaaggatacagggcttggaacatttcagtgtattccttgtgcagagtgtgagccatttcattcaatacacctgctgtgaagatagcacacatgcctcaagctggcagataaatctagccagctattcagtgcatttttgtcttcacctattctctataggcaatagctcatgtgcagtcttaaaaactttacttcttttcttaaaagcaacaagagcgaaattccatctcaagaaaaaaataaagaaataaatggccctgaggccagatgcagtggctcatgcctgtaatcccagcacactggggggccgaagcaggtggatcacctgaggttgggagtttgagaccagcctggctaacatggtgaaaccccatctctattaaagtacaaaaataagcctggtgtggtggctcacatctgtagacccagctactccagaagctgaggcaggagaatcacatgaacccaggaggtggaggttgcagtgagccgagattgcgccattgccctccagcctgggtaacagagtgagatcccatctcaaaaacaaaaccaaaaacaaacaagcaaaaagaaaaagaaagaaagaaagaaagaaaaagtggcactgcaaagaagccaactgatttataaatgactttagttctggatttattgaacatttaaggatatggctagtccttaaatgcttcaattatacttcatggaatggtctggaggaaaattattttctgaattccagaaaagcaggatagtccttgagcatcttgttacagatctccaggagagatgttctaccagatgttttcagtgtcccatgcatgctgccacacaatgtgttatgagaaggcagaggtggctttgggctgtggtagtcaggaaagactccagagtaaagggaccagaatttgaaaataagtgtgattaatataaataaaggttccgacaggcatgtggaaagggctgaagctgagtaacagaaggcacagaaacaggaaaggccgagtgtttttcacagagggtcacctggctatttgtgtactaatggtataaccaaggtacttaaagggctcactatgtcaaaggaaatgcttgtaggtgggtgcactgttaacctgagtagatcctccaaagaagagcctgttctattgttttgctgacctcttcatgctcgccaactgccagaaatctttctaaatgcttagcacagtacctcacacctagtagacactcagtagaggtttgtggaggggatggatacatgaatacatgatttaatcctgctatctgttgtttgcagcctgttctctcttaacgtgccctcaaatgagataaagcagccaaatacctgtattaaaaacctacactttccctccaggatttagtctcccttcatttgacaactgggcactggacaagggttacagagatcaaagatgttgcacttgtctggaggagcctttatcagatggccaggttgtctctaatataaactgtactattcccttaacctttactaatagctcctggccctcaacctttgactggcctcgctgaatgtactattacacagtaccaacccagggcccaaggctgtaggactgagacctccaaagttcaacaaagggcagaaaatatctctgctttctgctccagggagctgtgaatgcttcctgagagcttccctggccatgtagaaatgaacattcctctcagcggtagactggagcaggaggaacttggaagatgtgttttgttgctctagttcatgatagtgaatcacaaacatggctgtcagagtaatgatgcagtcatggagggttaaggaacagcttttaaatcctggttctgtccatcatgagcaatttgacataataaagattccagatttcatttcctcatctatatatctatatattaaatgaccccaccccaaaacaccgagggatcagtgtatgaatacaaagacataatggctgcagaaaggttattaaacatcaaaggctgtagaaatagcactttgcagtcaagttcagtcatggcacacatgggtctggaatgacagcttgggtttgaagcccagatctgccacttactaggcctgggaaaattactttacctctttttatctcaattttctcactaagaatactaaatgcacctggcttatcaaatgactatgagaattcaatgagatacaggactttctattgtccatacagtacctttaagtaagccagaaaaagtcactcttttctcaagacaccttattttcatctgctgaaaaaaatggtgataatctactaatatgtttgaacaatacacttttctgtcatctgctgggaaaaaatattgtcataaatatgcaaatatacaatgcctattgatatgagtggtacccacttagattagctactgtgtagtgcccaaccttcacaaccatacatggcaaccctgaatgaatggctgttaaagcacttcctacctaggatgggagaaatcaagcaatgttagctatttttgttattattattacaattttactattttatttcatcccctcctactcccagattaacaaatcataagttaggattatccacttgtacctagcagccagaattactgttgatctgtttgtctgtaaatatgcatagaaaatagatgatgatagaaaccaacacacctttggaaggtgagcagaccaggtaaggtagactaacaaaagcctacagaggagttgaggaaggactagggcagatgaacagtgagcatggggcgcttcccctccatagacaggctagcatggcgccatgcaacgcagctgctctctgaagcagagattgggacagctcgctgacagaaaacctcatacacttccaacctctggggtttggttgtggtaggagccctgatgttggtgaagtgacacccttccagagcaggacccatgctactccacctagtcaacagatggcacttggcctccctcctttgcctcttttttttttttttcttaaaacagtaattttgggtctcagccagaaaacctatagcatattagttctcaactgggaaaggggtcttgtacctacccctttaaatagctaataatgaatcttctctgtgaccctcctcctacctcttcatagacacataaatatttatatacaaatttaagagttttgtctaccctaatgattttcttcccctccaggtttattgaaatacaactgacaagtaaaagttgtatatattcaaggtttacaacatgatgatttgatatacatatacattgtgaaattattaccaaaatcaagttaataaacacatccatcatctcccatagttactattgtgtgtgtgtgtgcccgggtgtgtgtcatgaggacacttaagatctattctttttgcaaacttcaagtgtactacacagcactatcaactatagtcaccacactttacattacagccccagaatttattcatcctataatggcaagtttgtatcctttgaccaacatctccccattccccctgaccctcaccacagtccctggccaccactgttctactttctgcttctatgagttcaactttttagattccatgtataagtgagatcatacagtatttgtccttctataactggcttatttcacttagcatgatgttctccagttcatctatgttgttgaatgacagaatttctttcttttttatggctgaataatattccattatatatatgtgcaggtacatacacaacacagaccatattttctttatctactcatctgtcaatggacaccagtggtttctatatcttggctattgtgaatagtgctccaataaacatggaggtgcagatgtctctttgagatactgatttcatttctgttggatatatacccagaagtgggattgctaaatcatgtggtggttctatttttaattttttatagaaacttcatactgtcttctatagggctgtaccaatttacattcccaccagcagtgtacaagggttcacttttctctccaacctcaccaacacttgttatcacttgtcttttcaataatagcaatcttaacaggtatgaggtgatatcttattgtgatttgcatttttctgatgattagtgatattgagcaccttttcatatctacttgttggccatttgtatatcttctttataaagatgtctattaggttcctttgcccatttcttaatcaggttatttattttcttgctactgagtatatgagttctttatatagatgggatattaaccctttattggctaggtggttttaaaatattttctcccgttcagtagattggcttctcactttgttgattgttttctttgctgtgcagatttttagtttgatgtagtcccgctttttaatttttgcttttgttgcctgtgcttttggtgtcatatccaagaaatcatcgcccagaccaatgtcaaagagcttttcccctattttttctcctaggagttttacggtttcagattttacattcaagtctttaatccatttgatttttgtatatgctgtaagagaagtgttcagatttattcttttgcatgtaaatattgttttctgaacatcattattcattgaatagactgtcctttacctattgtgtgttcttgacatccttgtcaaagattagttgcccttaaatgggtggatttaattctgaactagcccactgtttttcaaccttagctgcacattgcactcacctggggaacttttaacattcttgaaatgctcaggccatactccagagcaattaaattagacattgatgcaggcatgcattggtgattccaacgtgcagcccaagttgagaaacaccagcctagccccttacttactcaaggaaaccatctctgatccttgtatcaggcagctgatttactaaagcttacatttccatagaaatttatcttggaaatttatttatagaataaatcattctcctaggcatgattgctaggagatttggaaagcatataatgggcattgtgaaaatgcaagatacatgagaaattcacaaacttccacatggttcccagcagggagctagtgggagctgggaaaataaaccagggggtgtccatttgagaggtcaaggcaggtgggcacaaacaattctttgaatacctaatcagcataggaaatggaagaattttgaaaatcaatcaggccatgggcctaaaggcaagcaaggaaggtaaataataataacatcagggttgaggtttcacacttaatctataaaactacttttaacaggcccctaggtgattataaattcgtggtggctttctctttattgggattatatgggtctattccatatttccaaaggaagcccttcctattatgcaggtgtgtctccttatttatttatttatttgcatttaagatattgaaacttttttaaaaaaaactcatttctgtgagcattaagtatataccatgcaaggaagcaattgtctctatcttatgaaatattaaatcaaaatgcttcctgttccctcatgtcccagagataaatacagcagtactttgaagcccctcttggagctgttttgcctgcaaatttattgttttgtctccattttcagaaagccctgttttctatgaagtatagcactctaggtagtttttaaggcgcaaactcctctggagttgcctgtgtcggcaacaactcttatgtagatggcacacgagggatggcgcgttgatcggctcctttaagatgacaaatgggcagagagtgttattgtctttgattgcatgccttacatcatctgtatgtaggaataagagggccatactttatctttagccattttataaatatttaagtccttatagttgcctaaagatattaaagcatattttacagtagtcggaatataaatattatatatagcacaagataccaaagtagtttaatgaattcataattttctgctcacatttattggaatgtgttttatgttccaaaagttccatttaaagaataagataccattctactccctgacaacacaccaagcattggccagtgttgggggcggggtctgagttccaatgtggggaagattctattaggaagcatggaggcaggaagtctcttccctggaatatatttcttctctctttaggtctaaatatgtgtgtgtatgtgcgtgtgtgtgtgtgtgtgtgtgcgcgcgcgtgttcgtgtgtgtgtgtgtgtgtgtgtatttttctgaataaataattctggtgcttatttaagtcccgtagcatttcaaaaagaaaattttatatctcctttcttctgtttcaaggagattaattcaaataacataagtaagagcaataaagataaagtttgcaattttcccgtcctcccatctccaactcccttttgtaaacagggatgcagattctatttgccagtatacaatggtgatccagggtcttaatgtgggtagtgacttcccaatgcattttgaatatttctcctgaaattaaagagttccaagttgcattttccttttcctaaatgcaaaaagatgacagggagaatattactgcacctcttttcaattttccagtgaaatataaaggctttcttctttaatatttcacaaagttcctccagttcccagtgggagtctatgctgggtaatgtttgctaattaccaacaacaaaactagacatacaacgttggtaaattacctgaccctttcctttttaatgagacaacaaggatttcgcgaagtggtgttgtttcactggttaatggtgtcagcaatgttgtaattgtgggttgagacacattagctgaacaaccacatgtagaaagggctttctctcgacaagctgtttggagactagaaccatattatcattaagcctatgtcatttgcatgctgctaatcgcttactttattatcctgcatatccattgtctttctttaattactctttaaattaaaattaaaaatagttttaaagcccacaatgcccgagatagcatcttgattatgaagataacttcaagaaaatggaacaactggttatatattgcctggattatgagagtcccatcgttatgtactgtgcctgcaggcctcaggggcctaattgcggtggtttctcttcctttagcccatagtgtttgtttaataaatggttatttatggccttctcagccattagagcaactttggagaaagtacttccttctccttggtttgagaagtgaagttttatcctctgggcaaaggtataaaactgaatcaaaaaaatctggatgtacactagagcttgtgaaggagtctgtaaggagatcctctggattccctttgctagcttattttgttggagatcacgtttaaaatttggggtcatgaaagagacataaatctcaaagctgagagggccttagagtcattcctattttacagatgaagacaccaagggccacagccattgccacgactgtgatcgcatagcagcaaatgaatgatttgactgttagcaaatggaaaggatgcagggctcctggagggaggatcatgccttaggggctactcctgagagaggatatgatgtgtacctggagttgtgatgtgcaagctacatggttgttgtggtttaatgtatttggtgcgcatctcttgtatgaaatgttgatatgtttgttgataccgacaatgtgataggattctggaagagagggctcctgtgttccacttccttaaaagaacaaccccatgaatgactccacagacattcctgaatattgagtagctgaacacagaattatcgtggtttcaatattatgtatgatgcacggtaatctaaagggatttgggacattgctacaacctcattttatggatgggagaactgagtttggataagacattgaatccttctacattctcacagagaggtaggagttgacctgggactaaaacccatgtgttttgttttctctgtcagcttacaaccctgttgttgataaataatagtaagttagtactgatgaagtacatgctctgtgccaggtgctgttgtaagcagtttccctgtattattattattaactcattcaatcttcatgacatcttcctcttccaatttgcagatgaggaaactgagacacaaaatttaaataaattgccccagatcacaaattagaaacagaaagaggcaggacccaaactcattcagtctagccacagtgttcaagttctagaccacaaatggtatggcttatttcaggtagtggtcaaaagttattgaccacgctgtacagagagatgctcagagtcaaaccagcatcaaaccctcatctagtgaagattcgtgtgtgtatgtatgtgggaatgcctgaccccaagatccaagatcccagtttcctattcatctgccagcataaacgtatgtacaggaaacacttcaacacttaagaaaaaaagattctttcttttaaagaaccatcaactgtttggaaccttggtgctatcttgggccaggcgtcttgtctctagaaccattcagagatagctggctgaaagttgttgatgcgattctgctttcctgaatttcatggcaaggccttggatcacttggcaaacccatcttttacagctacttaattttctgtgtgcttaagatatggatgttatactttgctcgtgattttggagttctggtttctgctgtgctggccatcaattcatactaaaccaaacaactggggcccatttggcatttggtattttaaatgtaaaaggacatttgaactacatgacaaatgctgaaaaacaaagcccatagcaccaagaacataaagaaactgtttataatgaaaaagtggttacattttcagtcaatctatcactttaatgagctcttcacgtttctttgattaatgcttgcaaaaggggagaaaaaaattgatgtaatggaaacaaaatggtatatagtcttggcagcatgaggggggatgtctgtgtgttttattagtatccccttgatatcattgtcttgtaatgtatatatctgccttttccctggcatagtaagcctctagtttactggaaatgtgatccatcatgaaagaggagatcccatgttagtggcaaaacagcctttgtcctcttgtggtggcagcaaagagggagggtcccagaacaggaattaagaataaataaaaacaataaagaaaggttagcataagctgtgccatattgaaattgggaagtccagtgggtatatgaagataaaacagaagaattaaagatgcttaacaacatttaaacattaatatgtagtaatttgtatatatttagtaataattcatacattttaaaataacgaataaaggggatggaaaaaaaggcagaggaaaacatcttcataaagtaactaaatgtgagaagttattcaaggcagacgtcctggaagaggtaaagaaacgacaggagctgggttgggagggaagagggggaacagcgtttctgaagtgggtaaggctggtgggagcagggatgggcatcagcaggtgccactttccctctgtgttggaaaccagctctgactgctcctcccttcccctatgtgcatggggcattgtgggtttcttgggctcttcactgcccatgtgtgctttatgtaaatggcctctgctctgagattgagtagctcttacaagatggtgggaggctgaaataacagagaactaggaagcctgaaaactctctctgggccctgttcttttaaagcccctttgctttgtaaccttggcctgatcacttccatctcagaacttcagtctccttaactgccaaatcaagtggatgttcaaagacctgtcagacccttacagatgaaccagctgtgtccatccatcatgttcatcagctgctctcaacccatagagatcacatgaggtttcgagatttcagggtctttaacatcaatttataatttaaaaaatttttttcattacataaataaaatgtgtttattttagaaaatttagcaattatagaaaccaaaaagaaaatgcacattccctgtaattttactgctcagacataagaaagttgacatatttgtcttatttccatagatataaatacttttaccctcaaaaaaatggatcatacatgtcagtatgttacctgtggtttttcacaaacattttatcatgaccatttttctgtcgtgaaatgtttttctgcattatttttagtggatgcatacttaaccaatttccctaaaattggacattcatgttgttttcagtggaatgttgttacttaatacctatgaatgaagaccctggcagccaaatttttaatgtaaggaaattatggctgtacacatatttttagaagtacaattgcttaggccaaagtggaggtaaaattataagtaatttgatccacactggccaagcaagtatgtctcattatattttattttttgagacagggtctcaccttttcacccaggctggagtacaatggcacaatcttggctcactgcaacctctgcctccctggctcaagcaatcctcccacgtcagcctcccaagtagctgggaatacaggcacaccctaccatgcccagctaatttttttgtgtttgtttgtttgtttgtttgtttttagtagagacgaggtttcaccatgttgctcaggcttgtcttgaactcctgagctcaagcaatccactcacattggcctccaaagtactgggattacaggcatgagccactgcatctggccttatctttaaattgtaagatgaattaagataaggtaaaactgagaagttgagatgttgtggagaaagcaatgataccatgagctcttgggtaaacggagacattagaccgggtgaatattaggtttctctccaaatctgtagttttaggtgtgtttgagttgttactagctttgtctttttcttccttcctccccttaaccaacccttctgagaaacatcttacacagtaagctctttaagcgaattctttttttctttttttttttttttttgagacggagtctcgctttgttgcccaggctggagtgcagtggtgcaatctcagctcactgcaagctctgcctcccgggttcaggccattttcctgcctcagcctcccgaatagctgggactacatctttaagttaattctaaggaaagagactgtctgcttggagagacaagtcctgtaaatatatttgtttcatgtgtgtgagacttgtctaagagctgaatatattttacgaatcttaatgggcaaataactatagagaagttttgtttgtttggttggtttaatttgctttggtttgggttggacccaaaatgtaaactctaaaaaggatggggcactttattcagtgggtggagtcaacttgcaaaggtgctaatcaaagacagtctctaaaaaaatgtaccgctaaaaatgtcactgttagttactgtaaatagaaagaaacaaggagagtattaagccaggtcttgtccctggtcactggagacaagcaggaaaccttaaatgaagatgcagtcatttgtttcagtagaaaatcaggccagcatgaatcatttcaccgcgaagagaatggagatttttctcagttgttgtactagttgggacattttggcacaagtgaaatccaatgcaaaaaggcttaagtaaaaacagagacatataactggaatgtctctggttttaggcacatttgtgtgcaggaacttgaacaatgacagagctctatctcattctctccacctcttggttcatttgccctgttttcattcaccccatggtgggctaactgcttgccagtagccccacacctgcagactcctgactttgcaaccacagaacctttaccatcttttacataatgtcctggggagaatacggacaggccctagattgaggaggacagactcatctctaaactgatgatgtggccaggattatgcaggaccatcagcggccctgtgaagtcaggatgcctggcttcatgttgccacttctgtttccagggtgggggcggagtttcttccctgcacccccaacaaacactgtggaatgggtttcttatgcatagaaggagttaaaaaggaacagaaaacagcagatatcaactatcctggttctgctgctaactggttctgtgaccttggatataataacttctccattctaagcctcagtttcttcatttgaagaatggaggaattgattagaggattttgaaaactctcgtgtttctagcatagaatgattgctgaagaggcaaaagacaccttatggtttggctcaggagtcacagaattatctgtttatacagtttccaagcactgtcattaggctttgtgcgggggagtcacaaattggcaggggcatttccccgcttccctccttgacactgacctccagcaccttgttgggggctacctctaccctgttggggtggcctttggggagtttcaggagaagctgctgccttggtaaataatcttttttttattgagtaaacatggtcagctgcctggccttcctgactctggattctagcttcataggaagccactgaaaactactgtgaaaaaatattacaaggttaaactgaggtttttcctttggctggatttttcttgcagtcatttccaaaaacctgtttcccaaatcaacctggtgtgtgtggattttcttcccctacaagttagaaagcaattgtgcttctatacatggaattttctttacttcagctgctgaagcattcgttggaatacatactgcaaaaatgactgctgtggctattaccgtagttgctcaggggagctattcagatgcctcatttattggagcttaatagattaaaagtccaaattgagtctcatgatataagcctaatcaagttctaatctgcataattttcccataagcagcaatgggaaatttggataatttatgtttcagcagttgccaatcatgtgttaaatagcattgttgcatttacttatcaaaatatttttattgatctgcacttcatctgacatttgcctttgaggtttttttccctggcattaacaggaaatttaattcatctcatagatgatgtaatatgagatgtttctcttgattttaacatgtctttatagatcatttttaaaggtgatctttcccttttacaacttcatattgaatacctgtctcagcaaacctagatgactcggcctaatttatttccctagtttaacgtagcatatggatttctaaccatcatttatatgcacacaataaaagataatttggcccaccatttgaaccaattcctttatgttaagtctatcggggtgggagaagcacttaccttcatttctccatctattctaggggagatgattgataagaatttccatctccctctctccctggaaaggctcagggatttaactagggaagatttagaaagtactttgtgtttcccccatggaaaagtactgtaataaagcatttattatatgtactgagttgtgcatgctgccataccaaagcaagttaagcataactacaatgggtcccagttgttatctgctattgtttaaaagtgaaaacaataaaaagtaagactggctcaggcctcagacttgcctgccagggacagtacctagaaggagaaggccagcacccaagtcagggatgcggcacagcctgcaggtgtcaggagtctgaggtcagactgcctggctgcggctcccagggacacttaccaattgggtatgcttgagccagttatgccactgctctgaatcttattttcctcttctacaaaatgcaaatatcaacagtccctaaacacacagggactgttatgaggaataaacaaggtggcccatgaaaaaacccttagcccagcctggcacataagaagcaatatggcgtggtggcttagaggagacactgggacttgtttatctgggttccactctgagatctgctaattcctagatgtatgtcctggggcaagttgcttaccttctctgtgcttcagtttcctcctctgaaaaatagtagtatatacataggatggttctgagaaccgaagttattacgtgagcaaaattcagtacatagtaagcactcagtaagtgttggctattttttttctttgggttctagttcagccttccccctctcttcttcattctcaattattaaccagtttaggtctagagtattcttgcctttgctttgagtctcataaaaacaatgccattgagcctttctcattttccaatgcacttgggtttacagtgtcctggaacccttttccagccattacttgtgtatatcttgtctgagccatagtccttctttccttatgatcacataaggaatattgtgtgtatatatatatatatatatatatatatatatacacacacacacacacacacacacacacacacacacacaatgctcattgccttctcattagtattctaggattttctgtgtgtgaaaaatcttttttaagaatctactaaatacttcttcagttctttatccatagggaaggggaagtgatccacgaatacttattgtatacctaataaaatattaatattggtagccagcattttttagcacttgcctcataccagatattgtactaaatgttttaaatacattattttattttatccttacaattgtcctatgtgggaggtatttgtggtttatcgatgaagaagcagactaggagagagtctgcacaatgcttatagtgccatggcttataggtggaggtgccagaatttgaatccaggacacctgactttacagcccatgctgttaacaatttcattctatttcttttctatgtgctgggcattttgtagataatctgggaagttcaaagaaatgaaaatccagtctctgacctaaagttcttatacagtatatagaatgagaatatctgtcataggataaagttggtcaagcacttatgtctcatgctgaatgaataaaataggtaacaaaaacctgccacaccagccactgaagattggagtggggagaaaacttacagtgtaaggagttcaggtggtctttggaagttatttattttatttttattgtttccagaagttattggggtattggggtacaggtggtgtttggttgcatgagtaagttctttagtggtgatctgtgagattttggtgcatccttcacccaagcagtatacactgccccatatttgtagtcttttatccctcgtctccctcccactcttaacccctaagtccctgaagtctgttgtatcattcttatgcctttgcatctccatagcatagctcccacataccagtgagaacatatgatgtttggttttccattcctgagttacatcacttagaataatagtctccagtctcatccaggtcactgcaaatgctgttaattaattcctttgtatggctgtgtagtattcactcacatatatatgtgtgtgtgtgtgtgtgtgtgtgtgtgtgatgtgatatatatatgtgtgtgtgtatatatatatatatctcacagtttctttatcctctcattgattaatgggcatttgggttagttccatggttttgcaattgtgaattgtgctgctataaacattcgtgtgcaagtatctttttcgaataatgacttcttttcctctgggtagataaccagtggtgggattgctggataaaatggtagatctacttttagttctttgaggaatctccacactgttttccatagtggctgtagtagtttacattgccgccagcagtgtagaggtgttctctgttcaccgcatccatgccaacatctactgtttcttgatattttgattatggccgttcttgcaggaataaggtggtatcacattgtgttttgatttgcattttcctgatacttagtgatgttatatacaaatggccaacaaacatatggaagtcatttttagcacaaaacttgcctcccatggccatgatcaacaaagtgctatgggtacatggctaaagaatcaggagcccatctggtgatagctttggctgtggatgatttaaacttcagtcttttcctgattgaggacttctcattccatgtctctaatggtgatattcttagtcatcttttctggcaaaataagtggttgtttctaaaattaacttcccaagtgttagtttaactaatgaagggagtgtttcccagtttcactgttctctagctgtagatctctggagtatattccatgtgccagtgtgttcacatgcagaactagggcgttgtttaatgtagagagacttcaggtgctacccatgatatagtcatggctgcaagcaataatgggaaggagagcaagatggtcagagattgggccacaatttagacctgcccctttatcaaatgcagctatgaggaatgcggtggacaccatcctatggcatcaaaggccggattgcctcattcctttatggaaggtgcttgaatttctcttctctccaaagccatttaaggaatctggggcaatcctgccgtttctgaccataattttcccatatcagtacccctaagaaagaaacaatgctaataaattatgttcacctttaacataactctacaccagggaaaaagaagaagccaactttgctgttattgttgccttttgcttttaaaaatgtgtgactagaaaagtagggaaacaaaaagaggcatgaagttttcttagcaataaaagcacacttttttggggagtcatgcataggggagagttgggccttcaacagagagatgtctttggacacctaccatagtttgtcagttgcagatgctaatggaaccaggcctggtgactgaaggggaaaatggaatatgaaagcaaaatgaaagaagcctatgaagcaagcatgtcatttccaaatgaaggtttcatgcaaaggaattgagtcttttcacagctgaaaatggaatctttaaataagataaaataaaaggatgccgtggcttgttgcgagttctgtaatgaaatacagttttcctaataccgtgtgacctgcatttctccctgctttatgggtgctattccttgacgtacaaacccgtattttctcaagtcagcatttgatgatggatgtcaaaatacaggccatgtattatgcatatagcattaccgatttaaggtgtttacttgtcaagttgaagaaattcaaaaacgtcacatccactgaatctgcacagctgtcacttccagtttttcatgtttttgaatgaaacttctaatgaaaacagtttagttttccccttcaccatcctagaagaagaaaacagctagcatttaaaaatgcgtgtttttggttatgtggttggctgaaaaacatatattcgaaagtttgaaaagatggacactacaatgtcaatcaaaatgacttacccttttcatagtgtattaatgtaaagaatcaatttaagtgcagtcagggaatggatattaagtaaaactttgtctttctttttgaaagtatggcactcagtgataagaaatgtatacacgggagagcagaaagtaagaaaacccttttatatttctctggcattttatgcattatgcacctccaaaacaacaggcaattattgagctcccgtatttcattcctgactcacacctagccaaaatgccagactcaacacaatcttgtcacattgctggaaagtgagtcagatatctggtcacataataatctatttggagttttatccttggaaatttagcaagtgactttgttcctaaaagtccctaattcattggtaagcccatgtagcattccgctgaaggaaaaaaggagaaaccgaagtgagtgtgaatgcttgcctatcatctaaatgtaattgcactgggtcttgccacttgcgtggagctgccgtatgcttcgttagaaaaattaatttttaccagatgaatgtaggaagtaaataggtttctaatattgatatgtgtccatgcaaaaccttaacgaggcagacattctgcctagccgggatatttctcactctcactaaactgaaagttacagttgttccaacctcatccaggtatgtacttggcttggacctgggacccaaagaagcccaaactgcaaaatcagagaccaagcaggctgctttccaattttcctgtgtccacatataccttatgtggtctgtgtttggcacactgggaagttcaagggatcagccataagcaggtggcatatacattagtcaggaggatttagatgcaagtaaactccttctccatttagcttaaacagaaagaaaaaaatgtgaacatcttattatattgtgtgtatgtatatgtataaatacatttgtgtatgtgtgtgtgtgtgtgtgtgtgtgtgtgtttatgtgtataaaatctcacatagggagaaatcctgaggtgggatggctccaggctgcttgccccaggaactccaggacagctcttcctgtcattcacttgagccaatatcactaagttagttatgccctcagctggtgcctcagttcctggcactacaggcacataaaaccgtgctcagtaaattaaaagagaatctcttcctatgtgtttctttttaagagcaaggaaacacttcctgaaagccccaggaagatttcctgacacctcccattggccagaactctgtgaaaactgaggcctaagtcactcaccagcaagaggataagcaattgattggtttacggtaacagtcaggccaggttaggttatgttgtggtaacaacaacaacaaacaaacaaacaaacaaatctcagcggcttaaagcaacacagctttattcttgactcactcagtatgctttgtgggtctgggtaactgtccagggctgttgtctagccttcatctccatagtaacctgtattctcacagttgccatggcctgggaagagagagatggctgtccaatacctgaaccagcagtgatatgcactgctctgctcacttttcatgggccagagcatttcatgtgtcacatggccatacctaacttcaagggggcacaggggataattctcctgtgtccctggaaagagatgggagccaagatctatgagcagaataaataattggtatgaagtctggattttttagggaactatgaagtgagttacgattatttataatggtttcctaccctgtccttctaaagaattaatcatcagagtttatcccgggaatactaattgttgacctgtgaataatgcataagctacatttttggggttgtatgtatatagtgtactctgattatttccaaattttctacttctctgatttttcttcctcctctgtttccttcccactagggttcacacctccaggaatggatagatcctctccagataacagcccagtgcacgggatgttacgtcaaccatccatcacaactggggtcaacatccccatcatcactgaactaggtaggggtcaatgtcagctttggggggagtttttgttctgtctttcaaaccatacaggatatgaggaggttggtttatttcttagccctttcaactttgtagctgctatggggtttgttttgagggggctgggaggaaggtatggggagaaatatggcagattaccggaagggaaaactgatctatctttcttctgagatgaatagacagtttccttcatgctggtcactgttttcaaaggagcatgagatgatggatttgcgattggggcattcaattgggaatggagaggaaaggaggaaaggcttagttcacggattctttctggtgatttttactgtaagaacctcttttgagcattctgtctggacagctcctacaatctgagtcctccactgatatacaaagcctcggatctaagccaaacccattttgggaacaaggtagaagccctgggctaatgtgtaataacttgacatttaacgtatcgtagttgaatatctcagccaaaagccattttcagcaaatgccattctggcccccaaaatgatggggttttgagggccatgttggttggacaatagaatctaacttctaacctggccatggcactccctgttaccattagtgagtgtgcaaaactgtagagtggcctcttcccccaagacaaatgcaaactacctgtggtccggggtccctttacttgagaatgtttcctctgttattccctcactctcttctttttctgtactttcctccactccctttccccaacccttaaatgctgtatccaattagctaaaccgggcaagttgcctttggtatcagtcaatcaggaaaaaaacagtgggacgcacattctaatgataactgaactgggtaagaagcactgttttccttcacatcagtatctccttttgttctgttgttggtgtttccaactatcatcagcttgtttttatttcaccggctgtaacagaaaggctaccccatggcactgctttgaatgtgttttatttgtggctctggttggaatcgactgtcttgttctggcctttcttaatgattttttccccacacagcatcagtaaacctttgatcacacccatctgacctggcagttgtttccaaagcatatttgctctaattcattttctctggcctgagccttttttccccacttttttttgtcaccccgctctcccgccttctcccttctactcctcttccaacatactgtcagtttgaatgacatgtcttcacagctcttagaggaagtcaaaggagaatatcaaaattttaagataagaaacctaagatggcactttccctccagctgtttatttttctttattctgactttatttgccttttttttttttcccccctactagggcatttctcagaagctctggttctgaagccataaaaacacctggtccctaggagaactttttttactaaaggcagatttcaagaagggtgcggaggataaggttagcagccacccacgtgcagccctgcactctggcccccaatcccagcccagaatcctctctgggagattcacaatggactcaggtggacgataaaggcctccagtcgtgactgcatttgttaggttcttccccacttccccgtgacttggttaataactccatgaagggcacccatcagcagcaagtctcagaactggggattgatcttctaaatagagacagcaaaagtgctgctcagcagaggggtggatagagaggtgggagcacctgccttcacatgactcacaaatgaaatgaacaccccattttcttggcccaaaaatatatttcaaaataagggagcaggctttcaacacagtaatcttgcttgcgagatgtctagaaaccaaggaataaattgtccaccactcagcagtgcattattgtaggtatagctatttatcaggacaaattcactcaggtcagggagtatcacactattttctgtttccaaccataggaggggtatctttttcatgtttagtgtagttgtttaaaagccctaggtttctggattgctctcctcagaactggagggcaataagagacccagggctcatgtggtccacgcctctggttggaaaattaatccaaacatctccatctcacaaacctacagcagcatttcagaatcctcactgccgggaatttcattttctatttggaattcacgtgccgctgactaactaggatatcttaatttgtcattagtagacgagaaaaggaaaagcttggtgccccaaacctaaggcaacaattctggtatttgattagcatcattgactctcctgaagcctttgtcccacaccagatttcttccttgtgttcagagaatctttcaggtgctcacaccacccttgtcttctgccttgaaacctatttctctagccactataccaccctcctcagaccatttcacctcccacatcccccacaaatacttcttatttatctacatgttctgagatgtgttctgcattatgccaggccagtataatgaattttaagagacacagagggcaccaaggccacacaagctttcaaagctgtgtagcacattccacttttcatctacttggagactctcaattgatgttagcatggcaaaggctcctcagagtctcacaagaaaggactgtgttacagctgtttcacctgactattccaattgtatttgaccacatatgctttggggtgattacgtgggtacctcttagcacccacataattactgttctgtgaaataggccttgagtagcattgcttgctctccttctgagactgggtatttcagaacggtatacaaggtattcactggaccctggctggtctcttggagcgcttttcctatgaccccagatgtctagctcactggcaatcgggagtcccctccccctacttggagtcacttcacctccatatctggtaccaacccttccccatcttcctgataagaggtaacagatgctgtgcttttcggagcattgccacacacaccattggtggctattacaagtaactaaaactgcattcttccatatgtggtctccagtttacattttctgattcacaaaacagaaagactaaacagtggcctacaacatccctttggacaagtgaagggaggtgaggaaaagctacctcttgaaagacccctgagcaagaccttcagtgtttccaagagaggcagagggaagctgggtattttcatgctataatgggtggacaggtatttaatgtcagaagggagatcatgacagcagctggtatttatcaagtcatggcatgatccagatgctgggccaggcttactgggcaccatcccattcgtatgagcctcctgacagcctcatgagagagctgctgtaactcccccattttacagaaacaaactaaggtatagaatgatgaaatgctttgcccaaggaagttggcagcacaggctggactgaagcccagttgtcagagcctggattttggactttcaccactagcctgcaattcaattgctgcttaaacaatggggacccaaatgtgaccaattttggaagaacagagcaaagattttccccattagaatttttctctggggaaacaagatgatgtcattttaaaatactaattccatgcctagcctttcatgctagtatcatttattctgcttcatacagtaaacaaaagttttttttttttaaaaaagaagagttatcaagaaagttgcttaaaaattaaaacaatcactctagaaaaaagaattagctgttgatacatttagaaaggaatcagggaaaggaaacctcatctgttctcttcctaaaatcacaataattatttcagaaattttgagtgcccccttctcccatccccccaccgacttttcccctattacttgctctgcaaaactgataatttccaaagccaagatgggaatggaaattaatttgtcatttaatttttaataagttaaagacatctgagtgacacaactaatcagcctgcacgtacatgcgggaggagtccttgaggaatcctcagatggaaatgaaatacagcatccaatgctgcatctgcttgaatgcaagcatataaaagattgagctgtttaggatgggaaagggagaacgtgggcgtccccatgcaactcaaaattcagagcaagtccttgtcagcaagcagcaggagacagccaggcatccatcccacctggggtttcctgtgtattaaacagggcctattgggtgtggacctagatttagggcctgggaccccgggaactacccaggccaatcccagtgggtaggctgcgggttatgcctgtggctgaattccttgctatctgcctttgctgtgctccccttccagcgctctttactcccaataagctgctttcttttcattgtggctaaaatgactatcccagcatggctgctcatcattgaaatatgtccatctctcaaaggacttggttaccaaaaaacactggaaagtgtttttaggtcatgatcctaaagctatgccaaaggactggccagcacagtctattggtcctccagtggcctgccgtggagcaagcctgcttgaacttattgctctccaggtctcagacacttaaacagtgacacaggaacagtccattgagtcccactgccccccttacccaaagatccatctacagcttattccatgcttttgtttccttctcaatgacttcagtatttctaaaccagtagcctggtctccctctggcttcaatgcctgtgtgtggtcttcagagctaattcttattttatgctttttctagtgaacgatactaatgttcagtttttggaccaagacgatgatgatgaccctgatacagaactgtacctcacgcagccctttgcctgtgggacagcatttgccgtcagtgtcctggactcactcatgagcgcggtgagttatcctgttccctcctcctcactcaagggtggaggatgtgccaatagagcacctccaacctttgaggccctgggctgcactggggccacagtggagagcaagactcctagaagctcacaccttagaaggggagacccacattataaaaccatcacacaagtaaatgtttgattataaattcctcaagtgcaaggaaggcaaggcaggctagaaggaaatataggtgagggcttgacctggttttggggatcccagaaaaattccccaagggagttgtacattttatgctaaaatttgagccataaagaggggagatcttgggggaagagcattctctgaagaagaaagaaagcaaatgcaaaacctggtgttgggggggacctgaggctctcaaagaaggcaaagaaaccctgtgaggctggaccatggggagacaagggtgcaggaggatggccaaggttagacctgcagaaccttgaaacacattttcatggttttggactttttcttaagaataatgaagaggcactgaaggattttagttggagagtgacataatcaggttcatgctttaaggggattgccttggctgttgtagggaggatgattcagaggtacaagatggcggcaggaggtctgagtaagaggctgtcatggcttggactaggatagagctggtgttgggatcgagggaggtggatggagctcagtggtattgggcagtacaattaataggacttgggaaaagattgagcatgagcagaaggtggagaggacagtgggtcaaagatgactgccaggcctgtcactgagactgaagtccttgggagagaaccaggcatggaggcaaggcctggctggaaggagggaggagttagtggcagagagaggacagtgggctggcccagggatcaaacacagctttggtttcttttataacttgatgtgcatctagcaatcaggcatttgttttttcacttttgcaaccgaaaaacaaataacgattaaaaaatgggtcccaacattatggagccatctttcactgcaaaaggcaaaagtaggcatttagaatgagtcataacctgggtattatgaagtcttcccactgagcatctttatttattatgtagaaaatcttcttcattttggagttctcaaattctcaatttgtgaaaatgcagacataggctgaacaaaaacttgacctttggagaatccatgataaagagcttttctgaacacattaaaaccataaacagaactcagagtttttacacacgtatatttcttaaagtgctgaaagttattctcctgaatgtgctaaacaactgatatgctaattatgtactggtctcatctattcattaaataatgctaatcccagaaggacctctatttgaggaaagaaaaaacataaagctttttaagactaatttgggttattctgtatgcctgaacattgtccaactgcaagcatatcttatttaaaaatcagaattttggatttaaaaatgactgtgaaatgacattcgtctgaattaaggttaactgggcttcatgccatgccatggctttccaagccaacaaggagataaaatggtccttggaaaagggctcccttggtttcctggggctcatgatctttcttatggcctgatgataccaaggctaacctttctacctgctagtgatgttgggctcagtttgggcaaactccttgagcaagccagaaggaatgatagaagcctcaagatgtgttcctaagaagaccatattctcagtcataggcctcatattctgcaaatccagtttcaaatggattttggtaattcatctcattagaaatttttattttagttctgatcctaattacagagatctcagaagactgttctaagagctggttaaactatttacagtagaatttttttttcagaactacaaaatactctgataacatttttaaaattccaaatttataaaattgtttatgtttctacatatcagatatttagtatgtttctagcaggactggctacataatttgcaaggtcacttttcatgaattattaagaatttcaaaatggtgacagcagagtattaaaacaaaagagacttggggctgggtgcggtggctaccgcttgtaacccagcactttagaaggccgaggtgggcagatcacttgagcccaggagtttgagaccagcctgggcaacatggcaaaaccctgtctctactaaaaatataaaaaaattagctgggtgtggtggtgtgcacctgtaatcccagctacttgggaggctgaggcctgagaatcgcttgagcctgggaggtggaggttgctgtgagatgatatagcgccactgcactccagcctgggtgacagaatgagaccctgtctcaaaaaataaaataaaataaaataaaacaacagagatgtgtctgagtacagccctgtgcaaccacataggctgaacacccatgaaaccagccctggttccaaggaataaaatcggtttgagcactggagaacttcttttcaacacagccaaaggggcatatggtagccacagggtggaggtgggggcccatctggatttgagttgcacaagcatctatatcatcagtaggtagtcagttcttggaaattcaaatgagaattcaaagtgaattgatttgaaatttttaaacaagccatctctcatctcctttgaaatgcacacaaaaatgtttgggatagtgtgactaaggcatgtttggatgcaatagtatgggagcagcatgtcttctgcattctagcctaggataaaagggtatcaggaatctggtaactgtcattgtatttatcatcaggagcatcatttactaagggcccagaactgtgcgaggcactttagctacactatcgaatcttttggacaataatgtgaatactcttggtttaagtgttgaagcaagacatatttaagtaagtcattgatggtaacttttcaaatcattaatcaaaatgcctatcaaattattccaggtcttgttttcattgtctaggatgaacaagcttcataatgaggtcttgagtagggtctgagtccacaaatctagttggatccagacgttttggtaaaatgttacctgtgatttctttgcattctaccccaaccttaatgtatgaaaaaacagattagtcaagtgccaaggcagtaactagaaggaacaaaaagggctgtcatgaatataaattgagaaagtgagactcctccaaacagcaggagacagaggtaaactttcattgcaggcattcactcataagcaacatcacaacatccacacacaaatctcttcagctgttgacagtctccttattctagcgctcctccccaaattgtcatttaatcatgtgtctaaacattctctgaatattgtccttcataacccaactcctgctgcttactgcttcatttgttaaaagaataatattttgattcatcacaggcattcctggaacagatcaggatgttacagacatggccctgtggctttatctcacaaatcaacagcagaaacacaggatgagagggaataattaggtttttggatatatgtctctaagaagatcacaacttagaaatgtatttttcagaatgataccatcttgatgcacacagtcgcaccaggtgaaaggaatcctctctgtttttagggatgagactcacatatgagtattcagatttctttttcatccagctatcactttctcccaaccccagccccaacttaagctccacttggaccctgaaaagtgaatactggacatggactcaagcgccagatggcttagatctggattccagaactgctgtttactggctgggtaaccttaacctccctgtgcctcagttttctcatctttaaaatgaagatagtaatagtacctatgtcacagggttgcagagatgagtaaatgggtaaaggttgtaaagcgattagagcggtgcttagcacttgacaagctctgtatgtatttattgttgctagtgtttttaatcaatacatttattgggcacttactggacaccaggcatgattccccatgctgcggattcagttgtaaaaaagaaggatgaagaccttgccttcatgttatttaaactttcattctagtgggttaagagtaaataggtaagtgaataaatgaatagtgtcacataaggataattgatttgaagaacatgaaatagcttgaatgggtgtggagacctgttttaccctcagtggtcagagtaaaattatcctaggaggtaacattgaagctgacactgaaaaaaacagagggagagaacactataaaggccaaagctgcacagtggtgacaagctgggtttggtttgttggaggaagcagttggaggccattatggttggaatgtggtagacaggaaggcaatcaagaaggcaaggccgctggccacactgagtattccgagtacaatagaccacatctggccaagttctaagtctggaatgagacacttcagacttggcgagaggatcctccttcttctgaaagccaccagcttcctcctaatgccactgtttctggatacgctggctaggacagtgagctcatcactgagttgattcctgaagcgcaacccttgattatttttttgtccaacaccccatcctcatgcactcattttagaagaagaaatagcacaatatattggcatagtacttggcttgatatcttgtttctaataaaagatctgtaatagaagtctcgaaatgtcacattgcagtctacatctaccccacagacaacttctgcatttatcaagtttttatttttaaattgaatttgttgccaatattttaaaataagattttatataaaatcggggttcctgccttctttaaattagagtcagaaggcagagtcccagattcccgtaaagcagctattggcttgagctgagcagctgctccctttagccacagtccacactactctctattgtatcccaccaggcctgcttcattcatgtcccttccctgcttggttcatcccactgtcctggccttaccagcctcctgcgttttgcttctaatcttatgtgtctgcattgcaatgtctgtggtcagacagcatccttggccttccggtcacttgcttgtcctctgagttaggaggttgtgcacatgatgtccattttccttgagccttggacctttcctaaacagataccaatcacactgaaccatcgttattgaaggagcagtgaggagccacctccttctgaggagaaaaaggggaaccctactacaagagctaatgagttccaatgcacacaagttgggagtgttgtcgttttttttttagaaaacaagatttaatgaagctttaggtttgcagggcctacctaatctggaaaaataaagaaaaagcatattataacagtgttaagagaaagagcagagaaaagcagaggccccttttgctagtgtacgatacatctgagaagcgtgaatgccagcctatggagagacccatgcgcaggatcccccaggagctagagagaaatttcaatgtgagccagttaaggcaggtgtgtctttgctctgcccactgcaccacaatgcccagggcaggagtttgcatgtccagtgcattcatattttcagaacaaaggcagtgacttggaggagggaaactgggccatgaattaggacttgtagcttctggtcctggctcaccggcagcccttgcacattttttctactgttaaatgggaatgatgttactccttatgactttctgctaattggagaatggcaaaggcatataaaaatctttcacagagcagatacgtatttcttaagatcacatgtaattacaaagaagcagatttttttggtatatatgcatgtacatatatgtatatatatttatgtgtttgtgtgcacttatcctctctctttctctctttcatgaacacacatcttagataatatttgggagcttagtgggtagatgagttggggtacccagaagatatgattccatgttctcatctttaatatcagagagctggcctgtttgccagaaacgaagttatatcagtaagactggagggtgtgaccgtctggaatgtgggttcacatgatttactgtctttcctgtactttcattaagggccaaacccttgaacctggtgttatggagaggcctgagttctctatcagtccaagctaacctaatgccatgtgattttagttacataaacaatttattgctccataaccctatttcttacactccactcaagagcctccatttcaactgctcacacggagacagagggcacatggccgtcccgaggcagaggagctagcagtggtgtcagtcgggtacatggaggtatgtcctgctagactcaggacagaccactgctgtcacatcaggccaggcaggcctggggtagggaaaaaaaaatccaatcattttcatccctcacgaaagaaaaatactaaaaataaaaatctacaccatgaaaactagcaaatataaaaaatggcagctatgacatggaaaatgacaattttagagcaattataaacgaaaggcagagagccattaaagttaaggcaatgttattaaaagatgtgttaattttcagttaaattttctataaaagaccaattagtttaaaaggcttgacagcattaactgtgaaacataagctccggtaattatactttaaaaaaataaaaagaggaggatgcttgggcgggttacacttgcaggcacagcggggcgtgggccaagcgggctagatggcgctgtgggctcaggtttccctgttacagtgccttggtccctcccctggcatttcatggtttcctcagtgtccttttacaggacctgagaatcatcaaactttagaggccaagcgggccacccttgtgttctgagccagctctcagagattagaatcagaacgccgagacacccggagagggaattgtctaaattggttgcattgctagttgatggttctttttataaactcccattttttgagtatgctttgtctatcagaagtttcacaaatcctctcatttaactctaatctataaatttttgttttgttttgttttttcatctctgttatatggatgaggaattcaaggcagagaaaagttaggcaactttttcattgttgtgcctattggatagcaaagcaggtattaaaagccacactaattggatttggaaatctgtactcataaccagggggccacgttgccttaatcagaagaagggcttcgctagtcaggtttgcaaacttgtccttggcagtgggaagagggactcctgtattccttagactatgcgggttccctgatcccaggctctgaacaggaccctaactcagctgtcttatactcaatgcccatgtgacgcaaggatagatattgagaaggtctctgcctgaagcatccctgaagactaaccctgccagagttggaggttctatacaagagcttcccagaagacttctagcacaggtatcatggtaaggcacagaaaagactggcaggacaaaagcttaggaggcaaaggatctcacctacatgatcctgcctttagaatgtttcatttcttcaattttagcatttatgttaacccagaaaaaaatgtgtgccttctgggtcaggtgagttgtagagaggtttcctccgcaggaagcgcctttggtaattggcatttgaagttctagcacctggtttgccccatgatgcagaaacagccatcacctatgcagaaagccttggagtgatgcttaattgcagactgctgaatgctccgtgaagtgccctaccccaaccctcactcccatcacataaggaaatttgcatcctccaatatgactgacctgacacccttttccagaaaaggcattgtctttccaccaaattattcagatcctgaagagataggtgtgcagagcacacccgtcagcaatgctcagagtccttttctgcatccgaatattggggtatcaaaacaggagcaaaagcatctgctggcaaaaatacatcatcattctctgtcatcacagattctgctgccccacagctctgctcctggatgcctgcatggaaaaatcaaggagagccatcatctgggatgcagtgccagctcagagagcagacaattatgctcagagatatgagtggtcccagagttgttcagacacctgtgaaaccctgggactgactatgaaattgtacctgttgatgagcaattctaaaagtcatgcactctttgactttcacacaatttcaggctaaaccaaggcccaacgattagtaggtgctcaataaatgtcagtgactgatcaaaaagatttgggtataactgatttcaacacagaagtgggaacatgttagggtcaaatcccaaagatttgacaaaacaataacctcccagcctgaccttctagatttatcattgcaatggataacctatagtgccctttgtttaaaaaaaattgactgtgtttttattagaacagttattcatacttcttgatgaaaatttggaaagcacagaaacatataaaagaagacatataaagaagaaacatataaaaataaaaagaaaacatataaagaagaaaatataaatggcctatgtttccaacaccaaggataagcatggttaatattttggtgtctttccttctaaatggatggataaatacagaattatctcattttataggttggttattttttcccttttcagttaatattttatccagagtattttattatttccttaggtgtcatgatttgcagagcctccataggactttatgagactccagtctgtggatgttccagaatcgatttatcactaaatttttggctatttagctttaaaaaatttttgttatagcaatgattaatcctgtaataaaaattattgtacataaatctttgaacaagtagcaacttattatattgaggcaaatgtactgggttttttttttttttaacaaatagggacattttaaaatttcttgatacatattgtcatgatatctccaagaaacaattttaccaatccacactctcgtcatactgagccatctcatacattatggcaaatgccgattgtcatttttcctaggaggccctttaattgtgtttatgatagttttgaagcatatcagtttttaatctgtatataatgatgtaaatacatattttatatagtgaattcagtttttatgcataaaaagtgcatgctgaacatgagaactatcaagcatcttgagattaaacagtttgctatatttttgtgaagttgtttgtggctacattttttgcctttaactatttagtaacatttactttcttttttacagaaatttaaaataaatgtattttcacagcagaaaatatataaaataaaattataggaaaaaaaccccaaattctaaaaccaagaattaactactaagtagaaattttgtgtactacttacagttactttcacataaatacgtctatcagttcaggtatgcattatttttccctctggaagtccccaaatcagagcattatgtactttttgtaatactttatggtagaaataaatgagtgaccataataataaacaggatatcattttctgataactttccattaaacattgaagatttatatttaaaaaataattcaaaaagtaataagtgcatgatttgttatattatgaaacagtgtacattataaagtttaataataaaaatgatctctacattttataaacatatgataattgaaaacattaaaaggaatcattagtatgaaaaagccaattaaaagtaatattaaaacttaaaacccagtaccataaagattcaatatttaaaagtgggtactcttaaaattaaattttaaatacagaaaaagttaatttccctagccaatagttttgcaggtatgcatttttaacatgaattgtgattcatggtgttttggggatcctacttttaaaaaacattttagtattatataattattaccatgccattaaatattatctgaaagcacaatattcatgtctgtacaatatgagtcatgtcaaagaaccattgtttaatcattaccatattgttgaaaaatttttatcagagagccagtttcccccaaatcattcattgagtaaaatcccttccctgtggtatgcaatgctttccttgttatactaaggaatggatcagcaaactgtcttgtaaagagccagatggtaaatattttcagcctttgagggccacatagtctctgtcacaactacttaactctgagtttgttagcaccaaagcagccccagacaatacataaacaaatggacatggctgggtcccaacaaaaccttattttaaaaaagtaatggatggcagagcaagatttggcccaagagccagatttgccaacttttgtattaaggtcttataactactaagctatggttctcataaatccattctggttgatcttctaatttttcacattgtctacaatatttggttaggaaacctttaaaatttactatactacatgagaggacaattttgtacaactctttccaggggaaatttagcataattttatcaagttttaaaaagtccaattcaaatctgcaattacacatatgtcaaacaacaattttactggaaaaaatgacattaaatggcctatttacatgttaaggaacatggaattttccttttttcctaatactctcctctgtctcttcatagatgattactactttgctttttgcctaaaaacagtagcgattcttattcacgtccagtgattggtattaaagagagtatctggaataatactgttaattctcctatgtatctgacattttattctccttatttctaattttatttgtgttttttcagttatattgtcataagtttattttttcaaggaattatttcttgaatttaacaattcactaaatatcctcttgctaattcattaactgacacttttcatcctgcttttttttaaaaaaagaattcttttaatacttaattttacttattataattctgttgtatttaataatagcattaaaggctctgaatttgtctctatagcattggcctcaagacatgatatttttatatgtcattctcaaatattctttaattttaaaatatttcatattctaagtttgatttccatcttgacctagtagttataggatacttaacaaaatttttttgatgttctggaatatttacttttgcctctattacattgtatttaatttttaaaatgtaggttatacagcttatactttgttatatgtattgagatttgatggttttggccattgatttttttttttgtaatcgttgttacaaagtttagtaaaaatacactaaatcaacctgattatatcctcaattttcttatcttttgatctatttggcctgtaaaagctaaaaacagtgatagtgggaatatttcacgtattacccttagtccagatttattctagtgtaattctaattagttttgctttctatatttcagttataatatttgtccataaaaaattatagctttattgtgtcaactatgaatataaaattaacttatctaacataatagtttaaaatttttctttgaagctatactttttttcttccctttttctcttttaaagatatcagagtttgattttggcatttgaacaagtctgaaaatctttgccattttataggatcatttagctcatttatgtttagttatataacataagatgctatagtcttgcattatgttttttacatgcttctatcataattatatgttttatgatccatcttttggtatgtggactatattttgtatgcttattttctgtagtgtaaactttccattctatttttaactctagttagttgttaccagccattctatagatgtattttctaagtattattgtctagaaaaatttagtagttcttgattcctccttgtataagatcaggcaattttcatgcctttatttccatcatcatctctatctcatctcatttttctaactttaaaacataattttagcaatactatattaatagctagttttgtcatttttttaataattagttttgacatttgcattccattttgtaataatatatacaataatcttttacaattctgttttaaatatattttaacagtaaaccaaatttgctcatattttagttactaagggtttaaaattatctttaaagaagctaatttttgtttctaagtatttaaaaaaattaaatcaataaatgcttatgtacgcaaagagtcaaaaaatatttcagttgccttcacaaattattggcaatttaactatatgtagaatttttggaacaaatgtgtcctgtcaaaattcctttgacattcctcttacattttctagagaagcttcagcctagccttattttatacttgtatttcttacagcattgttttaggtcatttttattctccatttaatattttgaattcaaatattcaccgagtacaggtctaggagttggccacattaacttgctgaatgcttttgatctgcatcctagattcatttcccagctcaggacaggttatttttatttgtttgtttgcttgttttacacgcttgcattttgtttacaactttgatttgtaaatacttactgtttatcacttgacctttgttgtctttttctcaatatcaaccagcactcttattaaacaaacaaacaaaaatccctatatctttctctatttagcttagaacttcctggttttacttccgtatcactaattgtgtgtgtgtgtgtgtgtgtgtgtgtgtgtgtgtgtaattttcacctctaatactcatggctccttagattaaaaagttggccagtgcaaatttagttgtcttttaactatttattttaaaaaaatgagacacaacatactatacaactcatccatttaaagtgtacgattcagtggttttttttttagcatattcacagacatgtacagccatcactacagtcaattttagaacatgttcatggcatcaaaaagaaactttgtattttagttatcctaccctcccctacaactccacccatcaacccaccaaccctaagccaccactgatctactcattatttctgtagacatgccttttctggatattttatataaatagactcttgttgcaggaagtcagagaccccaaacggagggactggctgaagccttggcagaagaacataaattatgaagatttcatggacatttatcacttccccaatcagtactcttaataatttcctatgtctgtctttaatctcttaatcccatcatctttgtaagctgaggatgtatgtcgcctcaggaccctgtgatgattccgttaactgcacaaattttttctaaagcatgtgtgtttgaacaatatgaaatctgggcaccttaagaacaggataacagcaattttcagggaacaagggagataaccttaaagtctggctgcctgtgggctgggtggaacagagccatgtttctcttattactgaaaacaggtaagagaaatattgctgaattctttccccagtaaggaatattaataattaacaaccctgggaaaagaatgcattcccaggaggagcctctaaaatggctgctctgggggtgtctgccttatggagttgcagataagggatgaaacactccctggcctcctgcagcgcccccaggcttgctaggattaggaaattccagcccggcaaattctagtcagaccggttctctgctcttgaaccctgttaagatgattatcaatgacaacgcctgcacagcaggacatggaagttccttaataattctagttttgccctgaccttgtgatctcgccctgaccttttgccttgtgaccttttgttgcccttgaagcatgtgatctctgtgacccacaccctattcatacactccctcccctttgaaaattgctaataaaaacttgctggttttgcggctcagggggcatcatggaacccgccgacatgtgatgtctcccccagacacccagctttaaaatttctcccttttgtactctttccctttatttctcagactggccgacacttaaggaaatagaaacgaatgtacattgaattatcagaggtggtttgtctgatagactctcagtacaatgtgttcaaggttcatccatgttgtagcatgtatcattgcatcactcttttttacggccaaataatactcattgcacggatataatacattttgtgcatgcattcattagctaatggaaatttgggttattttcaccttttgggtattaccaataatgctgctataaacatctgtgtacacgttttcatatggacatatatttttatttatcttgggtatatactgtaagagtggaatttctgggtcatatagcaacacaatgttcaaacatatgaggaactgcctagctgttttccaaagtgactgtgtagcaggacgagctgcagacaaaactcctcagacaccgagttaaagaaggaagaggtttattcggccagcggcattggcaagactcctgtctcaagagccgagtatcccaagtgagcaattcctgtcccttttaagggctcacaactctaagggggtgcgtgtgagagggttgtgatcgattgagcaagcagggggtacgtgactaggggcggcatgcaccggtaattagattggaacaaaaaaggatagggattttcacagtgcttttctatacaatgtctgtaatctatagataacataaccgattaagtgcgggtcagtctttaactaccaggcccagggtgtggcaccgggctatctgcttgtgggtttcatttctgccttttaatgtttactttttctttctttggaggcagaaattgggcataacacaatgtgaggggtggtctcctcccttaactgcaccactttacattcccaccagcagtgtgtgagagttccagtttctccttattcttaccaattcttgttattatcatcagtcttttttattacagctattctagtaggtgtaaaatatctcattgtggttttgatttgcatttctctgatgactagagctgttgagcctctttgcataagtttattaaccacttttatatctttttggagaaatgtttaagtcttctgcccgtttaaaaaattgggttgtcttttttggttgagttataaaaggctttttaatactgaatattagacccttatcagacatatgatttgcaaacatgctctctcattttgtaggttgtttttttcactttttggatagtgtccttcaaagaacaaatattttttaaatttttatgaagtccaatttaatctgttcttcttgtagtttatgctttttgtgtcatgtccaagaaactattgccaaatcaaaggtcataaagacttactcctatattttcttctaagcattttgcagttttagcttttacatttagatctttgaccccttttgtgttaatttttgcatatagtgtgaggtataggtcccactttattcttctgcctgtggatacccagttgttgctatgccatttgtttaaaagactatattaacttctccattgaatggtcttggcacactcactgaaaattaatagatcataactgaatgagtttatttctggattttcaattattttccattggtctataggtctatcctatgccattactatcttgattactatagtcttgtagtatgttttgaaactgggaagtatgaaacttccaacttcgtctttcttttataaggctataagattgctttggctattttgggtctgttgcagttttagagtcaatttttccatttttacaaaaaaatggactttgtgattttgataggtattacataaaatctggaaattaaggtagtattccatcttaataaatcaagtcttctaatccaggaacatgggatgtctgtccatttatttaggtcttctttaatttctttcagtaatattttgtagtttgcagtataccagtcttgttcctccttcaatatatttatttctaagtattttattcattatttttctgagacagaatctcactctgtcacccaggctggggtgcagtggcatgatctcagattactgcaacatctgccgcccgggttcaagtaattctctggcctcagcctcccgaggatctgggattacaggtgcccgccaccatgcctagctaatttttttatttttagtagagactaggattcaccacgttggccagcctggtcccaactcctgacctcactcctgacctcaaatgatcctcccaccttggcctaccaaagttctgggattacaggtgtgcaccatgcttggctgacctcccattttctaccacatcgagtttaaaatcccttgcttggtttttaaagccctgagttccccacgcctccaagaaaacaaagaagattaaaaattcaaaggaaagttgagaatggagctgactgttcctctacttggcaaaggcctcatgtctctgatatgaggccaaaatgtttatcagtgcttcctgtgcaccaagcatgtttctaagtgcttcatgggtaggtcatagagccccacagccttctattattacattttacagatcatgaaacggaggcacaaaaatgttaaataactttccaaggtcacacagcttctgagaggtgaagtcagcattaaacccctcagcccagctctggatccctggatcccataacctctccagaaacatatcctactttaagtatcctttttctgcttctgtgcctaagggcatatcttaactctgagcataaatttcctttagggtctggcaggctatggataacattcctaaattcttttgcagttggaattttgtatcacaatgggtgtttttgtaagtatttcaatgaggattgtgaatccagccccgctagtaactatcatcttaattcagaagtcctcatggaattatgtgaatataaatttggttttaatgaccactgttattttacagacgagaaaaatcaaagtccagaatgactaggcaacctccaagacatagaactagttagcaaacctgggatgggaacttgagctcacccttacttggtttgttccctactatgccttgccagctaaactctctaagaagctgctgaggtgcaattgcatctttccttacctctttccaaagtgcatcctcaaaagccacaggcaaactttgatttgagttttttagcctgcttgatttctacttacataggaaaatggaatgcacacccttacctgagaatttctcaaattaggctggtgacaaataccttttaaagctcctttatttgacatcctattaattttttttaaactcccattcttttgttcctgacagatctgttatgtttcagatgtgacacaaatgtacacttagagggaaacttctttaataagtgatatttgcctcagactactgaggttattttagaaaacaaaagccaaagtacacttaccaggacattcaccttttcataaatttatccggcatatttaattgatcgagatttctgagttagacagttatcaacgcatgtggtaaatcgttaagcgtgtggcattaatgaaaggttttgccgttgtcgtggggaggaagcttcctggcacatggatgacagggcctcagagacaatgctgcttgggttagtagctggggcaggctgcattttattacacgtgtccagaatctcatagtagtcacgtagactttaggagggggaggcaatatttgtatccctactaaaaccaattatggcaaacactaattattcagatttgagccctttactaaaaaatcccctgaactgggttttttaagtcaggctgtcgtagcagagccaagcaagagagaaaataacggaataattggaggctgctgtcttttcactccccacatgaaattatttgaagagacaggccagaactttaaacaggagataccaagaaaagttgtaatttggatgtcggctgtcatgactttagggtgtttgcttaaaggacttttccctcactttctctccttccccagacgtacttcaatgacaatatcctcaccctgatacggaccctggtgaccggaggagccacgccggagctggaggctctgattgctgaggaaaacgcccttagaggtggctacagcaccccgcagacactggccaatagggaccgctgccgcgtggcccagttagctctgctcgatgggccatttgcggacttaggggtgagtccacagcaccgaggtcacctgagcttgctgtttgggaaaagcttgatcctgaagaacgtggtatcagatgtgacaagctaggcatctggcttttctccttcctattgtagataactgtaagaggtgatatttatttatagtttactctggatcagacactttgctctatgcatagtcattcattttaatcttcatagcaaccctttgatataagttctagtatcacaccttctaagtcaactgaggcccagagagaatgagcactagacctattgggaatttgcaccaaggcatcctggcttcagagccagtgggctttctccctccttggtgttctcttcacgtatcctctgcacaaggtgagaagcagcaggtgatgccagcatgcagccaaggttgggaaatatttccacaggctcttagcgtagcttagggatactcaacccaactatacattaatagcacatggaggtggccagcctcagcctgcaggtttcttagtttttatatgtgaataggacccaggcactggtggttttcaaagcaccagggtagtcagtagtcagatgtatccagaaccaccggccaaacaaaccgaatcttatgtggatcctttaatgcctgtaaatcaaaacctagaccttgtaatttctgagagtggacccagtcacgttccctcatgtcctccctgtgacggaagtggccagcgtctcccttctgattccatgtatctgcctagtgtaggcactgtgacagaagtgtgctgtctttgcccttattcccagcccaaccccacagatgcatttaagagatgcagccataagtcacagaaactgataaacctgttacacaaacaatggtgtcgcccagaaagactaaatagtggaaaaggagccaaggaaagggtctgtctctgttttttctgaaacagtgctgcatactttccccatattttagtttgatcatggactgggacctatgttagactaggctttttttgaaagggaattttcatagctagtggctctttatacctatcatttacttattgatgcacttgattaggataaagactttagataatggtaagatttggtcccatcagtgttctttggtatgagaccaatatgagaattccaatgattggaaggacaaagacagtcattttatacccagtgaagccatcccgcagtgcccagtgcccttcatataatacaggtaacatctacctgaagccacctggccgctgaagccagcatttccaagtggatgcatttgctttcactttctgcatcaggccccagaccccgggaaggtggctgtgaactgatcagaactgcgaatcctagttattcagcctgcagacccctggctcctagggaaacacattctcttgcacccttgccatctctgaggtctgtaaattgtgcttttcacagggtccttacctcctgaaagagtctgtcaccataggacctggtggggtcctcctccttgcggtggttttcattatcactcagacagttttgacaacacgagcctatcacagcggttacagctgagctgggactgaacataatcaccattttgcagagaagggttcatctcctcagctgagcatacatctgagaccatcaagctttacactttgacttaaagtgagggagaagcataatctccttagagctttcaaaccccactgcgacaggtggaaaactggagagacaccagaggaaaaccccattgttacctgatccctaaaaatcacacatattgggtgtagtctgttaaacatgttgacttcttccactgccgtcccttggcacatggaccctccaacttgggagacaccaaaacaagctttgatgaaaagacccgtttccctgctgtcccttgattttcaggcaaataaaaaggatgtttctctctgttcttttgctgtctcccaggatggtggttgttatggtgatctgttctgcaaagctctgaaaacatataatatgctttgttttggaatttaccggctgagagatgctcacctcagcacccccagtcagtgcacaaagaggtgagtattggtttcaactctgccctcccacctaatcacagaaatattaatatcctttcctgtcccctactgtaaaggcaaaggtctgtatacatctcctcaacatgcaaattactctgcccatattaaatccaacactgagtttggaggtgatgggaagcatttttctataattactaatagtagatgtaaagacattttggtaagaattcaagttttgtattaatagaataattccatcacctaattacaaaagtctgaatacacaaacatctctcccaaactctagctactaggataacatctgttggtacctaatatagagatattttacattgctagtgtttaagataagtttttttgtttttttgttttttgtttgtttgttttttgagatggagtgttgctctgttgcccaggctggagtgcagtggcacaatcttggctcactgcaacctctgcctcctgggttccagtgattctcttgccttagcctcctgagtagctgggattataggcacacaccaccacacccagccaatttttgtgtttttagtagagagaaggcttgttggccaggctggtctcgaactcctgacctcaagtgatccacccacctcggcctcccaaagtgctgggcttacaggtgtgagccaccacaccccgccctaagataagtggttcttctgccatatctcagaatcccatatttttacttcacatattttaaattgactcgctttttaacttttatatatttatttttgagacaattatatattatcaccttaagcagagaaataacagtttagatgtgccaattatatttttctcatatgcattaaaataaattcatagcaggcaaaaattaaaagtacatcctagaattaccaagatcagtgagtttgcataatataccctaggcaacagtgctgcagagacaagcgtttctcatccctgcttgcatagtagaatcacctggggagcttttaaaaaatattctgattactctaacttaactggtctggaaggaagaaaacatcatatatatattttaaattatgtaaacattttatatataataaccagggattatagtgtatagccagaattgagaacaattgctatagaccagtgggttctcaaaatttagccatcatgagactcacctgcagagcttgttcaaccacagattgctggaccccatcctcagcacttccaattcagtaggtctgggtgggattgcttaagaacttgcatttcctagttcctaggtgatgctgacctgtgtggcctaaggaccacacttggtgaccactgctctaagtgaaacagcgtgattttcttagtcacatctgctgttgaccaaagaaagctccaactaattgtgaagaacaacaaagtagtgctgataagtaggcaggtttcttagattcttccatgtggtgaattccaaattccaaattctctcaccaaagtagattttaaaaggtaaagagcgagaatagtctaaggagacactctgtcatggtaaacaaagatcttgtgatgtatatctgggattgtccgaaaattatgaaatgaaagttgcatcacacttcatgaaacctcttgcggttgggctacttgaaagtgactttgaccttgtatagaaaggtacatgtagaccacgagaagcgaagtttggttcttccattactggctctaattccacatctctgcctgggctcctggctggcctcctttattgagttaaacagaggaagtttccatttaacaagaaaaagaatgtttaaggcctcagaccagctaggagtgcatcttccagatcctctgaaagtcctgagtaaccaggccattgcttttggttcagagagagttgaattctttactcagttactctcaggaggtgacatctctgctttccctgtccaggtatgtcatcaccaacccgccctatgagtttgagctcgtgccgacggacctgatcttctgcttaatgcagtttgaccacaatgccggccagtcccgggccagcctgtcccattcctcccactcgtcgcagtcctccagcaagaagagctcctctgttcactccatcccatccacagcaaaccgacagaaccggcccaagtccagggagtcccgggacaaacagaagtacgtgcaggaagagcggctttgatatgtgtatccaccgccactgtgtgaaactgtatctgccactcatttccccagttggtgtttccaacaaagtaactttccctgttttcccctgtagtccccccctttttttttacacatatttgcatatgtatgatagtgtgcatgtggttgtcatttttatttcaccaccataaaacccttgagcacaacagcaaataagcagacggaccaaaagttatttatgattctgggggaaaaataacccaaaggcatgctccagacataaatagctcactgcaggaacgagttcacagattagaagggagcacttgtgatcaacgtcagttaggcagagcaagtttatttaatgtaaaagaaaagttgattctgatttatcaggattatcagggtgctttgggttttgattttgttgttgttgttgttttcctttctttctttttttatacacacaataagttagcacatgtttatttgaaacaagcaaccaaacagcaatgaaaacatattgattgtttccagtctctgggccgaagtattgcgaagcatttgaaaagctttcacgatttgtgtagatgattatgaaggacctgcttgttgcaagagaacatcagtgatttttttagttactcaccaaggccttttgtcccagagccagttccctctgggagttcttatgaacatttctcaccttaatatggaggagagaatagtattccaatcatggatgtatcaaattctagtcatttagtttaagtgaaaagaggtttgattgcatattaaattgttattctgtctccttatgttgccatatgaatagctattttttttctttcacttttgacatttgggatgaaaagccatatgtatcataaatatcagatgtaagtcattaaaaactgccttcctgggacttttacatcttttaaaaggtgaattacttaccttatgtacagaataaataatgctcaggaaagagcaagtatttttccatgcattctcaggggatctttttactcccctttgtttgattagttagggccccaatgccaggtaggaggaagggctggggcaatggtagagtgagaggaagacaaacccagctgcagatcatgcttttctaggagccgacatgctaaataaattagaatgtaggaggatcagccacagttgactcaacaaagacaaaagccagccaccaccttcaactgttggcacagctgtgcggtgctggctgtcccaatgcagaaagctggtgggaaggaattcctcatcatcactttctttaatgtagccaatttaggcagggtaatgacggcaatagagagctgctccttgtcattatgagacgtgggataagaagagtgcaacagtgagccaaacacattttggtatagttatttttttcttcttttgttttctttcttttttaacacttagtaagcatgagaggagaggtagaaaaatacccttttttcaacatatagttgtcagatgctttgtgcatgcaaatcatgctttaggcagtgcggtatttcttaaaaactggccaattcaccataaccaatttcccttatggatggactaggctggtatatacatatttgaaaagttttacttcaaagaattccatcgaatagaataggggtaaaagggaggaggaaaacatgtcacagctgtaccatctctaaaaaggtgtttttatggtgaatgttttggatttagattttggatcccccgtcccctcaagcatgatagttttggatatttgcttgctgtgtgaattgacaagcacttttactgacaaatggtgaggctcagtcagaacctccaccctcccccacaccaaagacaggggcagcgtagtattcaaaccagtattgtggtggggaataattgtatacatgtaaattatcaagccctatgagtggaagaattttttcaaattatttttgtccctctatatattgatttatattatgtataactatctctttatataaactatatataattatatatatataactatataattatatatatataactatatatataactatatatatgtatcccctagtattggatcatgaagagctcttcatgcattctttgcaaaggaggttataaagttacgccctcagaacatttataactataagaatgtgccagttaaagtgctcaacaggaaatatgacagtttaaaagcattgtaaaactcacatagcttacttctctctctaaagtgcaacaaggatgaatagaatgggccaaggtatgacaattaatggttctgcatgacctagccactgctgggggttttcttctataacgttgtccttgtgaaaacttttgtgaaattaaaaaaaaaggagttacaaattttattctgttattggtttgtttatttttatttatattgttctgtttgtggttttatttattttgttttgcttttccccccctcccctttccctctccttttcccttccttcttctcttccttccttcttccactttctaaattgctcagcgcaatgaggctgtgctgctgctatcgctagattccttagagtttgttttggtgttcttgggtgtggggttgggtaatttggggggaacttctctccatctggcttgccttttaatctgcacgtggcctccctgcccaccctggtaccttgctccaagtccgaaagcattttcctatcaagaaacccagcttccttcacttcccccattgccaccccccaatcccagtccccccatcggtctgttcacatctctgtgttcatcttggcaagacctactcaatcaagtgatgatgccagttgataaacttccctggaaaacatttacagctattccatttggcaaacttgcttctctgtcaatatttcatcctcctttaaaccaggagggttattaatggcaaaagcattggtcttctttatgcttgatcagtatgactcaaattaaaagtgttctgctgtgtatatcaactcagtagcccacacccagttatctgggagctgatggttcagtcactgtattacccaaatctttcctgccagctgcctttcagacatttgttaaatcccaaccagagaccgggcagatagagagaagtaaatccgaagtgcgttttatatacagtctgttagcaactccaatgagatgatattgtgatgggaatggaatgggaacagactatgataagagatggaattttgaggttttcctggactttgggcacacagtcatgccccagtggtagataattgagaattcaccatatttgactaatgataaatttgatgatggagaaggatcattactacttcaattttatttgccaaaattactatattatactttccttaatagagtgaagagtcccctccattgttttctatttgactccaaacttccccttcctctttcagtagaacatctgcttacttaggaagtaggcatacaagtttcttattattatatctcttcctgttcactgcctcccgcaaaaaaaaaaaaaaaaaaaacaaggaagtaagggtagaaagtgagagttctttgaaaataaagtatatacatttaaaaagttaggaactctgttatctgcaccattctagaagagaagaaatttgtaagccatttagtccaacttgctttgggctttgaaaggggtgaacaataagtaggctggtaaaccagaaggcacggtgaagccttctcagtctcaacacttgggtgatcgtggcatcatcagtgtccctaaagtctgctacccaggttcttcccaaagccagttcaaatggatggagaaagctggactcttatacacacagttaaacttctgccacaattgggagaggtttcaaattctgttctgaatattaaagattatgacccagaaccttaccatcggtgctcaataaatatttgatataaattgactttacacatttttatacctttaaccattttctatattacccttgtcctcttggtttgatttttttaaaaaaatatgagtgcctctacatgccttatgatgctgctgtgttggtggcactttctcaagctggtcacatggcttctgagaaaggggaatagccctgtaagctcaatgagtagagacactgagtatgcctcttggcagcatcatcaagatcccagatgaccagaaaaagcttttgtctggctcttctgcagcatgggaaaagcctaaaggtgtctgcatcccaatagagacaattaaatcaacctgccaggttcctatagcaacaggctccttgaaggagaaagaggagagtacagaaactccagggcctgtggaagtcaagacagggtaaaaatcaatttctcaatcagcttctttcagcccatccctgctttgtcacaatatgataaagaagtagctgtgggcacctgtcactacactggctgactgtctcccatgcaagattgcatgcccattgcaaccattggaggtgagagggattatccgaaagggattagtgaagaatctgtcctcagggtgttggctggaccaagggccacagaggagggctgggagagcagtttgctcaaagaatggcagcatcagactttcagttaaaagagacagagtcatggtagccaattgcaaagaagtgagaaggtttttcataaacggtaattgcttttgttctggtacaaataatttgtatctctatgaaataagcatactttgctcacagagaggagaggaggtagtatgtgtgggtggggacggaggaggcatcagggtttgctgggcagaggaagtgtgccaggctgcctatcacaagcgcgggacaggaaaccacacagcattacccttgaaggtcgaagctccttgttagcccttactgttctccacggttgtctctctccaaacagcatcttttctttttgagccttttctctctcaacctcagcttgtggtgtagtgagaagagggccaattattccaaatgcttttgctgtatcattgtctccccttttctgcgatcttctcaagggagtactgtgaaaaggctaaatcccatggcactgacaacccacagagccaacagagaagctcaattatcacagtgcagcctgtttcttcctctgctggtggcagctcagtcagcccagctctggggcccttccctgcaagagcccattcctccagggtgacctgcagccctgtggctggaggaggttttgacccttattttaaaccctgtgatctcagtgatgaaactagaaatgcaagaaacagatggctctcagatgggataggatgcctggtgagtcaaagccagtatttcagaggcacagagtcaccctgggaggggaaaaaccctaagctccccagaaataacaccaggttacctcttcctctcctttaccttccaaatgaagatgaccaaccaaatccccctctgtcacctctgctgccacaatccatgttcttcaggatacaccccgatatacacacccctgttctctacccccagaatctctgctgaagggcatcatttgtcatcacattcaagaggtacgacccatgcttacatcatcctttagtactgatagtactcaggctagtactaaacttactctaaaagctaacgcttcagcaattgccttgggccaggcattctcatgagcactctttagttacctatacaaactcaatcctcacaacagcttcagatggagatgctgtgtctccatttgaaagacacagaatctgagagacactagagtctgtgaagttagccactgtgatataatgcccgctgatattattccaaatactcataaccttaacaactcacatttacttaccatgtatctggacctgtgtaagtgcttcaagggtactggcttcatttatctaaacaacactattaggaagtttgtatcatcagccctattttacagaaaaggaatgaagctaagataaatttgctaataacttgttcagagccatgcaactagtacgtgagctagatctgcttaactttcacctcctgccctgcgctgtctccttagcccgcatctccttgcttcttcatggtggacagctcatagcatagctggtcttgataggtgacatctgccaatggcagtggcaattgctctaccagcatctctctgcagttgttttccagagttttatcttgtcccactagccccctcccagccacagactgaaatgactcttctttcctaactccacgaactcctgacatgtcacacattgtactcagagcactgacaacaggcatctcatccttaagaagcttattaagaaataaggctatttttctctggcagcgaggaagccctcccaccccgatcaattgcccttctcatcttagagatgaaaataaagcccctggaaatctttctggtatgtgagatgaaacagggagtggagataaagtcagggatttggatttatccttgtcatggcagcattcattagagctgcttccctgagtcctcttcctcgtggtcaattttgtagccacccattggcattgtttcttcttcagaaggcaagattcaatacatcaaattatcattgtcctacttgcagcactctccatggatgctgaatggctggcgatcattgaaatgtgtgttccttggaagcatgttgggagaatctgttcgtaaaatacctttgcaccagacattttagtaaaacgcccagagcattcatacagttccgtttcctgaacatcctacataaccaagtctccaaaaacacacacatttatatcttaggaggcacccaaattaaacagctgtttctcaggcataaggaagacctcaactcctcaccacaatgtgtgttaacacaactcactccttgtgttgaggcagcatggccaaaacatgggctactctgcttagatttttttttttaatggcaagaaatgtaaaaggaaagagagaagtttaaatgaggaaataatgctctctttcttacagacagcagaaggaaattgatattctctctgccgcgaaaggtcaaaatgccaactttgaattgaactgtaaagactaaattccgaacaattattctcttcagcagttgtaaaaatttcagcaaattgcagctgtcttaggtctttcacccaaaagacctactcatttccatcagctgagttcactcttccaacctggcatgtccaacctagcactaaatccctttgcaaagtcagtctgcataacagcatggccaaaaccgagggcagctcaggcaacctgagcacaaacaccaggctcaacctctctgaaaatcatctttacacataaacccctggaaaaagtcgtagtgtgaaattgtttcagcggcctggcaaagcttttaaaacatgataaccatcacactttactcctctctgaaaggttagtttaatcgtagatcacaaaaaattggtttccacaaatgcataatggttcatctatgtcacacttgaactaaatggttttttaaatggagctgaaattattttgatgtgtacacagtcccggatttctatacaaccttttttaaccagcccatcaggaaccttgcctctaaagcctcattaataattcagatgtgctgatgactttaaaagatctatggaattgaagcttagggaaaaaaaaaaaactctgcttgacaaaaagataaatgaatgtagaaagaagctgtaggagtctggcaagctgtagatcatctcagaacagattgtaactttatcattctgtcagggggaataatttaaagcacttaatcagttagcttcactgtgaggatgtagcattatgaattcctatcgtccaatctgttcaaatcaaagtgaacttaattataataggtgagtgagccagagcaggagagggggtggggagaacgaggcaagaggcagcaagtttcctgtggggtaaactgagctgccgcattaaactggggcgaggctttgactcaggcatatcccagctccagtgacagccctcctcgacattgacagctcagggcacttgaaacagcagaagtaggaactgaggagaaacaagcagagtggtcatgaactgatcatagataatttataaatcattagccaaacatgcacataccccacccccaacgccccctatcaaaccaggtgagcagttttcactaatgtgtccattcaggaccactgacaaggcagttacaaattgttctggtaagcagaaaaagcagctacagaggccattgtctctatagcagtggacgtgcttgatagcttttaccctttttctttttcttttctttccctaagccactaaagtgaggcatatgattcccaagttagaatgtcctatttgcccagtcctttcctatctatacacatggccaatttcccagaaaatttcaatcctagaaagaggtggggatgagggttgagtcttgtaaaatagctttgcactgctaagaggatgctagaccattttcattctcaccccagcccccaaacgccctgactcagcattctctctcagccatttctgtatttagggtggaaatgaaatgccaagacttcattgagctcccttgtcgacagcttgggttattatagtcagttaagatattgccacttggaactctattcataactttataccaacacagagttttctttcttgaaataaaagccacctcaaaatcctctttaaaacattggtcgctattctgattttcatagatttttggccagcaaaatctatgggtttagtttagaccccccaaagtggctacaaatgaaacaggagagtggtatagttgagacatggctttaagtgtgtgtattataagcaaagccaagaaaaggctgggaggtggtgattctgtgtaagattctggatcactcgctctgcagcaagggtgatggtgcccttccgttccactcaaatcaatggatgcacacatctctcctcaggcacaatgtctgtacccaatggctgatatatgcaacatcccctccccaccaaaccttttctggccatgaaattaactccaagggacattgccagagtccattctccaatccctccttagcctctgaggtccgcccatggtgcctatgagtcccagtggcacattttgttcatcacttgctacaggaagcagaggtatatttcaggttctggggtcctccctacactgcactgtctctcttagcaattactcactgtcggcttctatcgattacctttttgcgtttttcaatgaactttccaaaggctttaccctaggactaattaaacttctcatttctccttcttgttctctatccattttgccctttagcagaaaagaaatggtttacagatgaaccggataatgcctatcccagaaacattcaaatcaagcccatgagtacccacatggctaaccagatcaaccaatataaatccacaagcagcttgattccaccaatcagagaagttgaagatgaatgttgactcccaggagaccagaactatttttttaaagcctgacaaacttcataaatggtgatgtgacttttcttcttacatgctgaatcactggtggaaacgttaggataagcaagaattgccagaaaataaagtagacagatctttctctttgtctgccttgaatattgcttccatgtattttggaaaagaaaatgatttcatttataaatgaacatactaaaatagtcatgtatagcctctagcattttaaattatttttatttattagaaagaaaatatattttttcttttcattgtcaaatatcttccctatatctaaacaatgcaaaatctaaatgaataagtggtcagactccttaatgtgtttttctcttctttctctctttttctttgaggagaatgatggtcaccaccacaattaattgtaattaagggaaatgaattattaaaacaattttaaaatggccaatgatgtatacatgtattttagtaaatccagaaaagaagactaaggggacaggtgaatacctgctcctcgcctggatgggtgtgtattttgatctgcattgacaccagctcttaataaatggaaacttatttattttcacagttgaaagtcatatttttgtagttctagttttcattctgtagttctcacccctttgttcatatttttaaagggaagaccttctgctgcttttctacaattggcagatcaggtttgtctggccaactaaggacaccaggagggttgtgggcacacctgggatgtggaagctgaggaccagatgcacacaaggcattgctctgtttgctgttctagtggtggagactcctacgtgctgttatgcttctcattttatatttccaaaccacctgagcgagtaatgtcaacttcgggagggtctggtggactttctccccactccccaagtctcagagcttttagcctggaagtttgtaaaactgattagtagttttactttaccataggatgtgagagggcagtcattcttctcactgagtttttgtttaaaaaccaggaaatttctacaatcatggagacagattttaatttgcatgctctcctttatttagttgctggggccaaacacatgaacttgttacaacaatttaaaaataataataacaaaaggaaagcaacgaatgcacttcatatagactgttagaaaaggcctttgaaaattaccagcagtgaaatcaaataaattagccactttaaactgcggtcaaaagatttttctagccatcagatgcaattacgatgtctcagagctctgctatcgcttgcatgctcggtgtacagtctcccggcaactgttttgttccaatcaacttagcaagtctttcaactttaaaattatcaatctttgatatgatcatcaaggtctctggagaagcatggatgtaatagtgatttctattttcttaaaaaatgtaaactgtggacacttaatggaaccaagctaaccaaagtatctccccgaagtttcatgatatctagtccattaactctttgggccatgacctgtggtacctagttatggtagtgcaaatcagatcagagcaaagcaatgagatcatcatgaagacatatgtccactaagtactccaattaccagcgtaggcaaaatgagcttccacctctgtccactccctgcagagccaatatagtcgtgcttccacctcgtaggcattgtcctgcagtgatttgtcggactgtggttactctgtcgtcacattttgtagaattagttctataaaagtattgtgaatacaatgtatgtccaattggattgtttaaaaactacttataattaatcactagcctactcagcagactaaaatgatgtcaacagtctatattcaggcttataaacatttcttggtttccaacagaagtcaaatgtgtttgtggggagaacgttttgctaggattttgacaactttcctgaaagctaggccttttttacataatgattttgcattggggtcaccttagtatattcacgtcaatccacgctcttctttccttcgtgaaccatagtgggctcttcactcctgctcgtaataaccacctccaaatttgttagagtgatttggtctcctctggcaggctgtggtggccacataaaggatcttccattagagggacacaggacacaaagctccattcccatgaccctctcttccctgtgtctcccctaacaaggcaatctggaagcagaaatgcaaactccagccccaccacacatccaccgatgcatttgtggctagaaattttaatctaaactttttttaaaaaaaatcataatagttaggatagtttcctatagcaaagggctccttgattcataagcacctcccccccaaaaaaaccaaattggtaaaaattcattttcttttaaatagagcaataagttcatactgtgttgccgttgtaataatgaattgttctggactagaaaacaaaatgaggcattttgttaagggggtaggaaaatgactgattgttgggccctttggcaaaagctggtgcctggtaagtagaaacgaaatggaaacagaaataacatttgtgaaatcactggagggctcaagcaaatgccagagcttctccctggcttgttcctacttgttgagctctttggccctgagtcccatccatctccactgcaacagtctgtctttctgcctacatccgcctgagaccaaggagggtctttggtacagtccacattatgaggctctgatttcctatcccagtttagggctccagaaaagccattctcccaaactaatgattcttgggtgctgtgggtcaccaacaggctgtttacaaagcagaaaatatcatcaccatcataacctttctccttgagaaaacttttatttttgtctaagcaattttatattttagaatatcatcttgaaccattataaaacaccttaaataaaagtgattgtgactaaggcacgttggagaacattccaatctttcctcccaagggttctggcaccttatgatgtactttgtaaaaaaattgattgaagattttaaataaacaggaaattagaagtgttagggttagataaaggaaaagtgaaaaagcataagaaatttgggactttttcatgttgaaaggagaaaaagcacaagttccctagttaccatttaatatgagggtgcaagagccacatttacaaacaacaaacttgatctttaaaaatgtttttaaaactctctgagtctcagtgacttcatttgtaaatgagagtgattcatctagatgactctaaggtctctttcaggtcccaggggacgtgatctaagttaggagtgggaacatgggagtggctgcttctccttggctaagcccatgcagactattgtgtccaggactggaataaaggtcctttttgctgcatcacccaggcaacactcccagccttactcaggagtggtgaacattttctgctctggacatagaataggtaggttcattcctggtcttttcactttagattctctttaggttcaagatgcagatttctcaatttggacacacctgcatcacgttggtcaaattttgctgcctgtttctagggttttcttctcagtttcatccctgccttcccttttttgttgttttttttttggttcaaggcccagcttcagttaatcccttcatctctatgccatgtctccaattcctagtatgtaactagaggttcaagagaccccaaattcctgccattttccccatttatgtttccccatgtgaatcttcaggaagtaaccagtcttccttctcacttcatttcctgtcctctgtttatttggttattttctttcattaataaactaaccatctcttagctacttacattcacaaatgtaattttaatctattgtgtttcattgtgaaagagaatctcattgaaggaaggaaggaagaaattgaggaataaaggtaggaagggagagaaacaaagactatccaaccaattgactgagatgtgagccggcttgactcctaggagactaagtagatccattcagcttgaacactgagttccagggcagaatctgtccattttctgttttgttcttacttgctgcttttggaatggtggtaaagccaccagtcaccatgagccttgaaaggaccttcactaatgaggacttgactcaccctctttaaaaagcaaaagaaacagaatttacttacaatcttctggtaaattacctttctgatcctctccttattcccaaaaggcaatttttttaatccagcagagatgatttagcatataaatcccaggtcatttgaggaggtgatgacgctatttggatttatttatgagacagtagtaattataaatgattcctaggcagtttgtactagtttggtcatattggttgtttaagtggagtctcttctgattgtttgtttccaataaagtatcagttgttaataatttcaagatttccataaaaataagaaaacttggaaaacatttttaattttatttcttaagagaccacagagcctaattttcaatttttatggtaagcttgcttaaaacatgtataaaaagaagcctacatgctcaaaggcagaggcacctttagccctacaacagttggaagctccatgatatcacagccccacatggatagattggagaaagaattctgacttagaccacctgtagcagaccttcctcttttggcatatttttttaatcacaaaaaggacctgagactccctatctaaagataagccaaacttggggtatacattaagaatctgggaagaaagaaaaaaaagaaaaagata

SEQ ID NO: 50 - DNA, 776943 bp, Homo sapiens
tatctttttcttttttttctttcttcccagattcttaatgtataccccaagtttggcttatctttagatagggagtctcaggtcctttttgtgattaaaaaaatatgccaaaagaggaaggtctgctacaggtggtctaagtcagaattctttctccaatctatccatgtggggctgtgatatcatggagcttccaactgttgtagggctaaaggtgcctctgcctttgagcatgtaggcttctttttatacatgttttaagcaagcttaccataaaaattgaaaattaggctctgtggtctcttaagaaataaaattaaaaatgttttccaagttttcttatttttatggaaatcttgaaattattaacaactgatactttattggaaacaaacaatcagaagagactccacttaaacaaccaatatgaccaaactagtacaaactgcctaggaatcatttataattactactgtctcataaataaatccaaatagcgtcatcacctcctcaaatgacctgggatttatatgctaaatcatctctgctggattaaaaaaattgccttttgggaataaggagaggatcagaaaggtaatttaccagaagattgtaagtaaattctgtttcttttgctttttaaagagggtgagtcaagtcctcattagtgaaggtcctttcaaggctcatggtgactggtggctttaccaccattccaaaagcagcaagtaagaacaaaacagaaaatggacagattctgccctggaactcagtgttcaagctgaatggatctacttagtctcctaggagtcaagccggctcacatctcagtcaattggttggatagtctttgtttctctcccttcctacctttattcctcaatttcttccttccttccttcaatgagattctctttcacaatgaaacacaatagattaaaattacatttgtgaatgtaagtagctaagagatggttagtttattaatgaaagaaaataaccaaataaacagaggacaggaaatgaagtgagaaggaagactggttacttcctgaagattcacatggggaaacataaatggggaaaatggcaggaatttggggtctcttgaacctctagttacatactaggaattggagacatggcatagagatgaagggattaactgaagctgggccttgaaccaaaaaaaaaacaacaaaaaagggaaggcagggatgaaactgagaagaaaaccctagaaacaggcagcaaaatttgaccaacgtgatgcaggtgtgtccaaattgagaaatctgcatcttgaacctaaagagaatctaaagtgaaaagaccaggaatgaacctacctattctatgtccagagcagaaaatgttcaccactcctgagtaaggctgggagtgttgcctgggtgatgcagcaaaaaggacctttattccagtcctggacacaatagtctgcatgggcttagccaaggagaagcagccactcccatgttcccactcctaacttagatcacgtcccctgggacctgaaagagaccttagagtcatctagatgaatcactctcatttacaaatgaagtcactgagactcagagagttttaaaaacatttttaaagatcaagtttgttgtttgtaaatgtggctcttgcaccctcatattaaatggtaactagggaacttgtgctttttctcctttcaacatgaaaaagtcccaaatttcttatgctttttcacttttcctttatctaaccctaacacttctaatttcctgtttatttaaaatcttcaatcaatttttttacaaagtacatcataaggtgccagaacccttgggaggaaagattggaatgttctccaacgtgccttagtcacaatcacttttatttaaggtgttttataatggttcaagatgatattctaaaatataaaattgcttagacaaaaataaaagttttctcaaggagaaaggttatgatggtgatgatattttctgctttgtaaacagcctgttggtgacccacagcacccaagaatcattagtttgggagaatggcttttctggagccctaaactgggataggaaatcagagcctcataatgtggactgtaccaaagaccctccttggtctcaggcggatgtaggcagaaagacagactgttgcagtggagatggatgggactcagggccaaagagctcaacaagtaggaacaagccagggagaagctctggcatttgcttgagccctccagtgatttcacaaatgttatttctgtttccatttcgtttctacttaccaggcaccagcttttgccaaagggcccaacaatcagtcattttcctacccccttaacaaaatgcctcattttgttttctagtccagaacaattcattattacaacggcaacacagtatgaacttattgctctatttaaaagaaaatgaatttttaccaatttggtttttttgggggggaggtgcttatgaatcaaggagccctttgctataggaaactatcctaactattatgattttttttaaaaaaagtttagattaaaatttctagccacaaatgcatcggtggatgtgtggtggggctggagtttgcatttctgcttccagattgccttgttaggggagacacagggaagagagggtcatgggaatggagctttgtgtcctgtgtccctctaatggaagatcctttatgtggccaccacagcctgccagaggagaccaaatcactctaacaaatttggaggtggttattacgagcaggagtgaagagcccactatggttcacgaaggaaagaagagcgtggattgacgtgaatatactaaggtgaccccaatgcaaaatcattatgtaaaaaaggcctagctttcaggaaagttgtcaaaatcctagcaaaacgttctccccacaaacacatttgacttctgttggaaaccaagaaatgtttataagcctgaatatagactgttgacatcattttagtctgctgagtaggctagtgattaattataagtagtttttaaacaatccaattggacatacattgtattcacaatacttttatagaactaattctacaaaatgtgacgacagagtaaccacagtccgacaaatcactgcaggacaatgcctacgaggtggaagcacgactatattggctctgcagggagtggacagaggtggaagctcattttgcctacgctggtaattggagtacttagtggacatatgtcttcatgatgatctcattgctttgctctgatctgatttgcactaccataactaggtaccacaggtcatggcccaaagagttaatggactagatatcatgaaacttcggggagatactttggttagcttggttccattaagtgtccacagtttacattttttaagaaaatagaaatcactattacatccatgcttctccagagaccttgatgatcatatcaaagattgataattttaaagttgaaagacttgctaagttgattggaacaaaacagttgccgggagactgtacaccgagcatgcaagcgatagcagagctctgagacatcgtaattgcatctgatggctagaaaaatcttttgaccgcagtttaaagtggctaatttatttgatttcactgctggtaattttcaaaggccttttctaacagtctatatgaagtgcattcgttgctttccttttgttattattatttttaaattgttgtaacaagttcatgtgtttggccccagcaactaaataaaggagagcatgcaaattaaaatctgtctccatgattgtagaaatttcctggtttttaaacaaaaactcagtgagaagaatgactgccctctcacatcctatggtaaagtaaaactactaatcagttttacaaacttccaggctaaaagctctgagacttggggagtggggagaaagtccaccagaccctcccgaagttgacattactcgctcaggtggtttggaaatataaaatgagaagcataacagcacgtaggagtctccaccactagaacagcaaacagagcaatgccttgtgtgcatctggtcctcagcttccacatcccaggtgtgcccacaaccctcctggtgtccttagttggccagacaaacctgatctgccaattgtagaaaagcagcagaaggtcttccctttaaaaatatgaacaaaggggtgagaactacagaatgaaaactagaactacaaaaatatgactttcaactgtgaaaataaataagtttccatttattaagagctggtgtcaatgcagatcaaaatacacacccatccaggcgaggagcaggtattcacctgtccccttagtcttcttttctggatttactaaaatacatgtatacatcattggccattttaaaattgttttaataattcatttcccttaattacaattaattgtggtggtgaccatcattctcctcaaagaaaaagagagaaagaagagaaaaacacattaaggagtctgaccacttattcatttagattttgcattgtttagatatagggaagatatttgacaatgaaaagaaaaaatatattttctttctaataaataaaaataatttaaaatgctagaggctatacatgactattttagtatgttcatttataaatgaaatcattttcttttccaaaatacatggaagcaatattcaaggcagacaaagagaaagatctgtctactttattttctggcaattcttgcttatcctaacgtttccaccagtgattcagcatgtaagaagaaaagtcacatcaccatttatgaagtttgtcaggctttaaaaaaatagttctggtctcctgggagtcaacattcatcttcaacttctctgattggtggaatcaagctgcttgtggatttatattggttgatctggttagccatgtgggtactcatgggcttgatttgaatgtttctgggataggcattatccggttcatctgtaaaccatttcttttctgctaaagggcaaaatggatagagaacaagaaggagaaatgagaagtttaattagtcctagggtaaagcctttggaaagttcattgaaaaacgcaaaaaggtaatcgatagaagccgacagtgagtaattgctaagagagacagtgcagtgtagggaggaccccagaacctgaaatatacctctgcttcctgtagcaagtgatgaacaaaatgtgccactgggactcataggcaccatgggcggacctcagaggctaaggagggattggagaatggactctggcaatgtcccttggagttaatttcatggccagaaaaggtttggtggggaggggatgttgcatatatcagccattgggtacagacattgtgcctgaggagagatgtgtgcatccattgatttgagtggaacggaagggcaccatcacccttgctgcagagcgagtgatccagaatcttacacagaatcaccacctcccagccttttcttggctttgcttataatacacacacttaaagccatgtctcaactataccactctcctgtttcatttgtagccactttggggggtctaaactaaacccatagattttgctggccaaaaatctatgaaaatcagaatagcgaccaatgttttaaagaggattttgaggtggcttttatttcaagaaagaaaactctgtgttggtataaagttatgaatagagttccaagtggcaatatcttaactgactataataacccaagctgtcgacaagggagctcaatgaagtcttggcatttcatttccaccctaaatacagaaatggctgagagagaatgctgagtcagggcgtttgggggctggggtgagaatgaaaatggtctagcatcctcttagcagtgcaaagctattttacaagactcaaccctcatccccacctctttctaggattgaaattttctgggaaattggccatgtgtatagataggaaaggactgggcaaataggacattctaacttgggaatcatatgcctcactttagtggcttagggaaagaaaagaaaaagaaaaagggtaaaagctatcaagcacgtccactgctatagagacaatggcctctgtagctgctttttctgcttaccagaacaatttgtaactgccttgtcagtggtcctgaatggacacattagtgaaaactgctcacctggtttgatagggggcgttgggggtggggtatgtgcatgtttggctaatgatttataaattatctatgatcagttcatgaccactctgcttgtttctcctcagttcctacttctgctgtttcaagtgccctgagctgtcaatgtcgaggagggctgtcactggagctgggatatgcctgagtcaaagcctcgccccagtttaatgcggcagctcagtttaccccacaggaaacttgctgcctcttgcctcgttctccccaccccctctcctgctctggctcactcacctattataattaagttcactttgatttgaacagattggacgataggaattcataatgctacatcctcacagtgaagctaactgattaagtgctttaaattattccccctgacagaatgataaagttacaatctgttctgagatgatctacagcttgccagactcctacagcttctttctacattcatttatctttttgtcaagcagagttttttttttttccctaagcttcaattccatagatcttttaaagtcatcagcacatctgaattattaatgaggctttagaggcaaggttcctgatgggctggttaaaaaaggttgtatagaaatccgggactgtgtacacatcaaaataatttcagctccatttaaaaaaccatttagttcaagtgtgacatagatgaaccattatgcatttgtggaaaccaattttttgtgatctacgattaaactaacctttcagagaggagtaaagtgtgatggttatcatgttttaaaagctttgccaggccgctgaaacaatttcacactacgactttttccaggggtttatgtgtaaagatgattttcagagaggttgagcctggtgtttgtgctcaggttgcctgagctgccctcggttttggccatgctgttatgcagactgactttgcaaagggatttagtgctaggttggacatgccaggttggaagagtgaactcagctgatggaaatgagtaggtcttttgggtgaaagacctaagacagctgcaatttgctgaaatttttacaactgctgaagagaataattgttcggaatttagtctttacagttcaattcaaagttggcattttgacctttcgcggcagagagaatatcaatttccttctgctgtctgtaagaaagagagcattatttcctcatttaaacttctctctttccttttacatttcttgccattaaaaaaaaaaatctaagcagagtagcccatgttttggccatgctgcctcaacacaaggagtgagttgtgttaacacacattgtggtgaggagttgaggtcttccttatgcctgagaaacagctgtttaatttgggtgcctcctaagatataaatgtgtgtgtttttggagacttggttatgtaggatgttcaggaaacggaactgtatgaatgctctgggcgttttactaaaatgtctggtgcaaaggtattttacgaacagattctcccaacatgcttccaaggaacacacatttcaatgatcgccagccattcagcatccatggagagtgctgcaagtaggacaatgataatttgatgtattgaatcttgccttctgaagaagaaacaatgccaatgggtggctacaaaattgaccacgaggaagaggactcagggaagcagctctaatgaatgctgccatgacaaggataaatccaaatccctgactttatctccactccctgtttcatctcacataccagaaagatttccaggggctttattttcatctctaagatgagaagggcaattgatcggggtgggagggcttcctcgctgccagagaaaaatagccttatttcttaataagcttcttaaggatgagatgcctgttgtcagtgctctgagtacaatgtgtgacatgtcaggagttcgtggagttaggaaagaagagtcatttcagtctgtggctgggagggggctagtgggacaagataaaactctggaaaacaactgcagagagatgctggtagagcaattgccactgccattggcagatgtcacctatcaagaccagctatgctatgagctgtccaccatgaagaagcaaggagatgcgggctaaggagacagcgcagggcaggaggtgaaagttaagcagatctagctcacgtactagttgcatggctctgaacaagttattagcaaatttatcttagcttcattccttttctgtaaaatagggctgatgatacaaacttcctaatagtgttgtttagataaatgaagccagtacccttgaagcacttacacaggtccagatacatggtaagtaaatgtgagttgttaaggttatgagtatttggaataatatcagcgggcattatatcacagtggctaacttcacagactctagtgtctctcagattctgtgtctttcaaatggagacacagcatctccatctgaagctgttgtgaggattgagtttgtataggtaactaaagagtgctcatgagaatgcctggcccaaggcaattgctgaagcgttagcttttagagtaagtttagtactagcctgagtactatcagtactaaaggatgatgtaagcatgggtcgtacctcttgaatgtgatgacaaatgatgcccttcagcagagattctgggggtagagaacaggggtgtgtatatcggggtgtatcctgaagaacatggattgtggcagcagaggtgacagagggggatttggttggtcatcttcatttggaaggtaaaggagaggaagaggtaacctggtgttatttctggggagcttagggtttttcccctcccagggtgactctgtgcctctgaaatactggctttgactcaccaggcatcctatcccatctgagagccatctgtttcttgcatttctagtttcatcactgagatcacagggtttaaaataagggtcaaaacctcctccagccacagggctgcaggtcaccctggaggaatgggctcttgcagggaagggccccagagctgggctgactgagctgccaccagcagaggaagaaacaggctgcactgtgataattgagcttctctgttggctctgtgggttgtcagtgccatgggatttagccttttcacagtactcccttgagaagatcgcagaaaaggggagacaatgatacagcaaaagcatttggaataattggccctcttctcactacaccacaagctgaggttgagagagaaaaggctcaaaaagaaaagatgctgtttggagagagacaaccgtggagaacagtaagggctaacaaggagcttcgaccttcaagggtaatgctgtgtggtttcctgtcccgcgcttgtgataggcagcctggcacacttcctctgcccagcaaaccctgatgcctcctccgtccccacccacacatactacctcctctcctctctgtgagcaaagtatgcttatttcatagagatacaaattatttgtaccagaacaaaagcaattaccgtttatgaaaaaccttctcacttctttgcaattggctaccatgactctgtctcttttaactgaaagtctgatgctgccattctttgagcaaactgctctcccagccctcctctgtggcccttggtccagccaacaccctgaggacagattcttcactaatccctttcggataatccctctcacctccaatggttgcaatgggcatgcaatcttgcatgggagacagtcagccagtgtagtgacaggtgcccacagctacttctttatcatattgtgacaaagcagggatgggctgaaagaagctgattgagaaattgatttttaccctgtcttgacttccacaggccctggagtttctgtactctcctctttctccttcaaggagcctgttgctataggaacctggcaggttgatttaattgtctctattgggatgcagacacctttaggcttttcccatgctgcagaagagccagacaaaagctttttctggtcatctgggatcttgatgatgctgccaagaggcatactcagtgtctctactcattgagcttacagggctattcccctttctcagaagccatgtgaccagcttgagaaagtgccaccaacacagcagcatcataaggcatgtagaggcactcatatttttttaaaaaaatcaaaccaagaggacaagggtaatatagaaaatggttaaaggtataaaaatgtgtaaagtcaatttatatcaaatatttattgagcaccgatggtaaggttctgggtcataatctttaatattcagaacagaatttgaaacctctcccaattgtggcagaagtttaactgtgtgtataagagtccagctttctccatccatttgaactggctttgggaagaacctgggtagcagactttagggacactgatgatgccacgatcacccaagtgttgagactgagaaggcttcaccgtgccttctggtttaccagcctacttattgttcacccctttcaaagcccaaagcaagttggactaaatggcttacaaatttcttctcttctagaatggtgcagataacagagttcctaactttttaaatgtatatactttattttcaaagaactctcactttctacccttacttccttgttttttttttttttttttttgcgggaggcagtgaacaggaagagatataataataagaaacttgtatgcctacttcctaagtaagcagatgttctactgaaagaggaaggggaagtttggagtcaaatagaaaacaatggaggggactcttcactctattaaggaaagtataatatagtaattttggcaaataaaattgaagtagtaatgatccttctccatcatcaaatttatcattagtcaaatatggtgaattctcaattatctaccactggggcatgactgtgtgcccaaagtccaggaaaacctcaaaattccatctcttatcatagtctgttcccattccattcccatcacaatatcatctcattggagttgctaacagactgtatataaaacgcacttcggatttacttctctctatctgcccggtctctggttgggatttaacaaatgtctgaaaggcagctggcaggaaagatttgggtaatacagtgactgaaccatcagctcccagataactgggtgtgggctactgagttgatatacacagcagaacacttttaatttgagtcatactgatcaagcataaagaagaccaatgcttttgccattaataaccctcctggtttaaaggaggatgaaatattgacagagaagcaagtttgccaaatggaatagctgtaaatgttttccagggaagtttatcaactggcatcatcacttgattgagtaggtcttgccaagatgaacacagagatgtgaacagaccgatggggggactgggattggggggtggcaatgggggaagtgaaggaagctgggtttcttgataggaaaatgctttcggacttggagcaaggtaccagggtgggcagggaggccacgtgcagattaaaaggcaagccagatggagagaagttccccccaaattacccaaccccacacccaagaacaccaaaacaaactctaaggaatctagcgatagcagcagcacagcctcattgcgctgagcaatttagaaagtggaagaaggaaggaagagaagaaggaagggaaaaggagagggaaaggggagggggggaaaagcaaaacaaaataaataaaaccacaaacagaacaatataaataaaaataaacaaaccaataacagaataaaatttgtaactcctttttttttaatttcacaaaagttttcacaaggacaacgttatagaagaaaacccccagcagtggctaggtcatgcagaaccattaattgtcataccttggcccattctattcatccttgttgcactttagagagagaagtaagctatgtgagttttacaatgcttttaaactgtcatatttcctgttgagcactttaactggcacattcttatagttataaatgttctgagggcgtaactttataacctcctttgcaaagaatgcatgaagagctcttcatgatccaatactaggggatacatatatatagttatatatatagttatatatatataattatatagttatatatatataattatatatagtttatataaagagatagttatacataatataaatcaatatatagagggacaaaaataatttgaaaaaattcttccactcatagggcttgataatttacatgtatacaattattccccaccacaatactggtttgaatactacgctgcccctgtctttggtgtgggggagggtggaggttctgactgagcctcaccatttgtcagtaaaagtgcttgtcaattcacacagcaagcaaatatccaaaactatcatgcttgaggggacgggggatccaaaatctaaatccaaaacattcaccataaaaacacctttttagagatggtacagctgtgacatgttttcctcctcccttttacccctattctattcgatggaattctttgaagtaaaacttttcaaatatgtatataccagcctagtccatccataagggaaattggttatggtgaattggccagtttttaagaaataccgcactgcctaaagcatgatttgcatgcacaaagcatctgacaactatatgttgaaaaaagggtatttttctacctctcctctcatgcttactaagtgttaaaaaagaaagaaaacaaaagaagaaaaaaataactataccaaaatgtgtttggctcactgttgcactcttcttatcccacgtctcataatgacaaggagcagctctctattgccgtcattaccctgcctaaattggctacattaaagaaagtgatgatgaggaattccttcccaccagctttctgcattgggacagccagcaccgcacagctgtgccaacagttgaaggtggtggctggcttttgtctttgttgagtcaactgtggctgatcctcctacattctaatttatttagcatgtcggctcctagaaaagcatgatctgcagctgggtttgtcttcctctcactctaccattgccccagcccttcctcctacctggcattggggccctaactaatcaaacaaaggggagtaaaaagatcccctgagaatgcatggaaaaatacttgctctttcctgagcattatttattctgtacataaggtaagtaattcaccttttaaaagatgtaaaagtcccaggaaggcagtttttaatgacttacatctgatatttatgatacatatggcttttcatcccaaatgtcaaaagtgaaagaaaaaaaatagctattcatatggcaacataaggagacagaataacaatttaatatgcaatcaaacctcttttcacttaaactaaatgactagaatttgatacatccatgattggaatactattctctcctccatattaaggtgagaaatgttcataagaactcccagagggaactggctctgggacaaaaggccttggtgagtaactaaaaaaatcactgatgttctcttgcaacaagcaggtccttcataatcatctacacaaatcgtgaaagcttttcaaatgcttcgcaatacttcggcccagagactggaaacaatcaatatgttttcattgctgtttggttgcttgtttcaaataaacatgtgctaacttattgtgtgtataaaaaaagaaagaaaggaaaacaacaacaacaacaaaatcaaaacccaaagcaccctgataatcctgataaatcagaatcaacttttcttttacattaaataaacttgctctgcctaactgacgttgatcacaagtgctcccttctaatctgtgaactcgttcctgcagtgagctatttatgtctggagcatgcctttgggttatttttcccccagaatcataaataacttttggtccgtctgcttatttgctgttgtgctcaagggttttatggtggtgaaataaaaatgacaaccacatgcacactatcatacatatgcaaatatgtgtaaaaaaaaagggggggactacaggggaaaacagggaaagttactttgttggaaacaccaactggggaaatgagtggcagatacagtttcacacagtggcggtggatacacatatcaaagccgctcttcctgcacgtacttctgtttgtcccgggactccctggacttgggccggttctgtcggtttgctgtggatgggatggagtgaacagaggagctcttcttgctggaggactgcgacgagtgggaggaatgggacaggctggcccgggactggccggcattgtggtcaaactgcattaagcagaagatcaggtccgtcggcacgagctcaaactcatagggcgggttggtgatgacatacctggacagggaaagcagagatgtcacctcctgagagtaactgagtaaagaattcaactctctctgaaccaaaagcaatggcctggttactcaggactttcagaggatctggaagatgcactcctagctggtctgaggccttaaacattctttttcttgttaaatggaaacttcctctgtttaactcaataaaggaggccagccaggagcccaggcagagatgtggaattagagccagtaatggaagaaccaaacttcgcttctcgtggtctacatgtacctttctatacaaggtcaaagtcactttcaagtagcccaaccgcaagaggtttcatgaagtgtgatgcaactttcatttcataattttcggacaatcccagatatacatcacaagatctttgtttaccatgacagagtgtctccttagactattctcgctctttaccttttaaaatctactttggtgagagaatttggaatttggaattcaccacatggaagaatctaagaaacctgcctacttatcagcactactttgttgttcttcacaattagttggagctttctttggtcaacagcagatgtgactaagaaaatcacgctgtttcacttagagcagtggtcaccaagtgtggtccttaggccacacaggtcagcatcacctaggaactaggaaatgcaagttcttaagcaatcccacccagacctactgaattggaagtgctgaggatggggtccagcaatctgtggttgaacaagctctgcaggtgagtctcatgatggctaaattttgagaacccactggtctatagcaattgttctcaattctggctatacactataatccctggttattatatataaaatgtttacataatttaaaatatatatatgatgttttcttccttccagaccagttaagttagagtaatcagaatattttttaaaagctccccaggtgattctactatgcaagcagggatgagaaacgcttgtctctgcagcactgttgcctagggtatattatgcaaactcactgatcttggtaattctaggatgtacttttaatttttgcctgctatgaatttattttaatgcatatgagaaaaatataattggcacatctaaactgttatttctctgcttaaggtgataatatataattgtctcaaaaataaatatataaaagttaaaaagcgagtcaatttaaaatatgtgaagtaaaaatatgggattctgagatatggcagaagaaccacttatcttagggcggggtgtggtggctcacacctgtaagcccagcactttgggaggccgaggtgggtggatcacttgaggtcaggagttcgagaccagcctggccaacaagccttctctctactaaaaacacaaaaattggctgggtgtggtggtgtgtgcctataatcccagctactcaggaggctaaggcaagagaatcactggaacccaggaggcagaggttgcagtgagccaagattgtgccactgcactccagcctgggcaacagagcaacactccatctcaaaaaacaaacaaacaaaaaacaaaaaaacaaaaaaacttatcttaaacactagcaatgtaaaatatctctatattaggtaccaacagatgttatcctagtagctagagtttgggagagatgtttgtgtattcagacttttgtaattaggtgatggaattattctattaatacaaaacttgaattcttaccaaaatgtctttacatctactattagtaattatagaaaaatgcttcccatcacctccaaactcagtgttggatttaatatgggcagagtaatttgcatgttgaggagatgtatacagacctttgcctttacagtaggggacaggaaaggatattaatatttctgtgattaggtgggagggcagagttgaaaccaatactcacctctttgtgcactgactgggggtgctgaggtgagcatctctcagccggtaaattccaaaacaaagcatattatatgttttcagagctttgcagaacagatcaccataacaaccaccatcctgggagacagcaaaagaacagagagaaacatcctttttatttgcctgaaaatcaagggacagcagggaaacgggtcttttcatcaaagcttgttttggtgtctcccaagttggagggtccatgtgccaagggacggcagtggaagaagtcaacatgtttaacagactacacccaatatgtgtgatttttagggatcaggtaacaatggggttttcctctggtgtctctccagttttccacctgtcgcagtggggtttgaaagctctaaggagattatgcttctccctcactttaagtcaaagtgtaaagcttgatggtctcagatgtatgctcagctgaggagatgaacccttctctgcaaaatggtgattatgttcagtcccagctcagctgtaaccgctgtgataggctcgtgttgtcaaaactgtctgagtgataatgaaaaccaccgcaaggaggaggaccccaccaggtcctatggtgacagactctttcaggaggtaaggaccctgtgaaaagcacaatttacagacctcagagatggcaagggtgcaagagaatgtgtttccctaggagccaggggtctgcaggctgaataactaggattcgcagttctgatcagttcacagccaccttcccggggtctggggcctgatgcagaaagtgaaagcaaatgcatccacttggaaatgctggcttcagcggccaggtggcttcaggtagatgttacctgtattatatgaagggcactgggcactgcgggatggcttcactgggtataaaatgactgtctttgtccttccaatcattggaattctcatattggtctcataccaaagaacactgatgggaccaaatcttaccattatctaaagtctttatcctaatcaagtgcatcaataagtaaatgataggtataaagagccactagctatgaaaattccctttcaaaaaaagcctagtctaacataggtcccagtccatgatcaaactaaaatatggggaaagtatgcagcactgtttcagaaaaaacagagacagaccctttccttggctccttttccactatttagtctttctgggcgacaccattgtttgtgtaacaggtttatcagtttctgtgacttatggctgcatctcttaaatgcatctgtggggttgggctgggaataagggcaaagacagcacacttctgtcacagtgcctacactaggcagatacatggaatcagaagggagacgctggccacttccgtcacagggaggacatgagggaacgtgactgggtccactctcagaaattacaaggtctaggttttgatttacaggcattaaaggatccacataagattcggtttgtttggccggtggttctggatacatctgactactgactaccctggtgctttgaaaaccaccagtgcctgggtcctattcacatataaaaactaagaaacctgcaggctgaggctggccacctccatgtgctattaatgtatagttgggttgagtatccctaagctacgctaagagcctgtggaaatatttcccaaccttggctgcatgctggcatcacctgctgcttctcaccttgtgcagaggatacgtgaagagaacaccaaggagggagaaagcccactggctctgaagccaggatgccttggtgcaaattcccaataggtctagtgctcattctctctgggcctcagttgacttagaaggtgtgatactagaacttatatcaaagggttgctatgaagattaaaatgaatgactatgcatagagcaaagtgtctgatccagagtaaactataaataaatatcacctcttacagttatctacaataggaaggagaaaagccagatgcctagcttgtcacatctgataccacgttcttcaggatcaagcttttcccaaacagcaagctcaggtgacctcggtgctgtggactcacccctaagtccgcaaatggcccatcgagcagagctaactgggccacgcggcagcggtccctattggccagtgtctgcggggtgctgtagccacctctaagggcgttttcctcagcaatcagagcctccagctccggcgtggctcctccggtcaccagggtccgtatcagggtgaggatattgtcattgaagtacgtctggggaaggagagaaagtgagggaaaagtcctttaagcaaacaccctaaagtcatgacagccgacatccaaattacaacttttcttggtatctcctgtttaaagttctggcctgtctcttcaaataatttcatgtggggagtgaaaagacagcagcctccaattattccgttattttctctcttgcttggctctgctacgacagcctgacttaaaaaacccagttcaggggattttttagtaaagggctcaaatctgaataattagtgtttgccataattggttttagtagggatacaaatattgcctccccctcctaaagtctacgtgactactatgagattctggacacgtgtaataaaatgcagcctgccccagctactaacccaagcagcattgtctctgaggccctgtcatccatgtgccaggaagcttcctccccacgacaacggcaaaacctttcattaatgccacacgcttaacgatttaccacatgcgttgataactgtctaactcagaaatctcgatcaattaaatatgccggataaatttatgaaaaggtgaatgtcctggtaagtgtactttggcttttgttttctaaaataacctcagtagtctgaggcaaatatcacttattaaagaagtttccctctaagtgtacatttgtgtcacatctgaaacataacagatctgtcaggaacaaaagaatgggagtttaaaaaaaattaataggatgtcaaataaaggagctttaaaaggtatttgtcaccagcctaatttgagaaattctcaggtaagggtgtgcattccattttcctatgtaagtagaaatcaagcaggctaaaaaactcaaatcaaagtttgcctgtggcttttgaggatgcactttggaaagaggtaaggaaagatgcaattgcacctcagcagcttcttagagagtttagctggcaaggcatagtagggaacaaaccaagtaagggtgagctcaagttcccatcccaggtttgctaactagttctatgtcttggaggttgcctagtcattctggactttgatttttctcgtctgtaaaataacagtggtcattaaaaccaaatttatattcacataattccatgaggacttctgaattaagatgatagttactagcggggctggattcacaatcctcattgaaatacttacaaaaacacccattgtgatacaaaattccaactgcaaaagaatttaggaatgttatccatagcctgccagaccctaaaggaaatttatgctcagagttaagatatgcccttaggcacagaagcagaaaaaggatacttaaagtaggatatgtttctggagaggttatgggatccagggatccagagctgggctgaggggtttaatgctgacttcacctctcagaagctgtgtgaccttggaaagttatttaacatttttgtgcctccgtttcatgatctgtaaaatgtaataatagaaggctgtggggctctatgacctacccatgaagcacttagaaacatgcttggtgcacaggaagcactgataaacattttggcctcatatcagagacatgaggcctttgccaagtagaggaacagtcagctccattctcaactttcctttgaatttttaatcttctttgttttcttggaggcgtggggaactcagggctttaaaaaccaagcaagggattttaaactcgatgtggtagaaaatgggaggtcagccaagcatggtgcacacctgtaatcccagaactttggtaggccaaggtgggaggatcatttgaggtcaggagtgaggtcaggagttgggaccaggctggccaacgtggtgaatcctagtctctactaaaaataaaaaaattagctaggcatggtggcgggcacctgtaatcccagatcctcgggaggctgaggccagagaattacttgaacccgggcggcagatgttgcagtaatctgagatcatgccactgcaccccagcctgggtgacagagtgagattctgtctcagaaaaataatgaataaaatacttagaaataaatatattgaaggaggaacaagactggtatactgcaaactacaaaatattactgaaagaaattaaagaagacctaaataaatggacagacatcccatgttcctggattagaagacttgatttattaagatggaatactaccttaatttccagattttatgtaatacctatcaaaatcacaaagtccatttttttgtaaaaatggaaaaattgactctaaaactgcaacagacccaaaatagccaaagcaatcttatagccttataaaagaaagacgaagttggaagtttcatacttcccagtttcaaaacatactacaagactatagtaatcaagatagtaatggcataggatagacctatagaccaatggaaaataattgaaaatccagaaataaactcattcagttatgatctattaattttcagtgagtgtgccaagaccattcaatggagaagttaatatagtcttttaaacaaatggcatagcaacaactgggtatccacaggcagaagaataaagtgggacctatacctcacactatatgcaaaaattaacacaaaaggggtcaaagatctaaatgtaaaagctaaaactgcaaaatgcttagaagaaaatataggagtaagtctttatgacctttgatttggcaatagtttcttggacatgacacaaaaagcataaactacaagaagaacagattaaattggacttcataaaaatttaaaaaatatttgttctttgaaggacactatccaaaaagtgaaaaaaacaacctacaaaatgagagagcatgtttgcaaatcatatgtctgataagggtctaatattcagtattaaaaagccttttataactcaaccaaaaaagacaacccaattttttaaacgggcagaagacttaaacatttctccaaaaagatataaaagtggttaataaacttatgcaaagaggctcaacagctctagtcatcagagaaatgcaaatcaaaaccacaatgagatattttacacctactagaatagctgtaataaaaaagactgatgataataacaagaattggtaagaataaggagaaactggaactctcacacactgctggtgggaatgtaaagtggtgcagttaagggaggagaccacccctcacattgtgttatgcccaatttctgcctccaaagaaagaaaaagtaaacattaaaaggcagaaatgaaacccacaagcagatagcccggtgccacaccctgggcctggtagttaaagactgacccgcacttaatcggttatgttatctatagattacagacattgtatagaaaagcactgtgaaaatccctatccttttttgttccaatctaattaccggtgcatgccgcccctagtcacgtaccccctgcttgctcaatcgatcacaaccctctcacacgcacccccttagagttgtgagcccttaaaagggacaggaattgctcacttgggatactcggctcttgagacaggagtcttgccaatgccgctggccgaataaacctcttccttctttaactcggtgtctgaggagttttgtctgcagctcgtcctgctacacagtcactttggaaaacagctaggcagttcctcatatgtttgaacattgtgttgctatatgacccagaaattccactcttacagtatatacccaagataaataaaaatatatgtccatatgaaaacgtgtacacagatgtttatagcagcattattggtaatacccaaaaggtgaaaataacccaaatttccattagctaatgaatgcatgcacaaaatgtattatatccgtgcaatgagtattatttggccgtaaaaaagagtgatgcaatgatacatgctacaacatggatgaaccttgaacacattgtactgagagtctatcagacaaaccacctctgataattcaatgtacattcgtttctatttccttaagtgtcggccagtctgagaaataaagggaaagagtacaaaagggagaaattttaaagctgggtgtctgggggagacatcacatgtcggcgggttccatgatgccccctgagccgcaaaaccagcaagtttttattagcaattttcaaaggggagggagtgtatgaatagggtgtgggtcacagagatcacatgcttcaagggcaacaaaaggtcacaaggcaaaaggtcagggcgagatcacaaggtcagggcaaaactagaattattaaggaacttccatgtcctgctgtgcaggcgttgtcattgataatcatcttaacagggttcaagagcagagaaccggtctgactagaatttgccgggctggaatttcctaatcctagcaagcctgggggcgctgcaggaggccagggagtgtttcatcccttatctgcaactccataaggcagacacccccagagcagccattttagaggctcctcctgggaatgcattcttttcccagggttgttaattattaatattccttactggggaaagaattcagcaatatttctcttacctgttttcagtaataagagaaacatggctctgttccacccagcccacaggcagccagactttaaggttatctcccttgttccctgaaaattgctgttatcctgttcttaaggtgcccagatttcatattgttcaaacacacatgctttagaaaaaatttgtgcagttaacggaatcatcacagggtcctgaggcgacatacatcctcagcttacaaagatgatgggattaagagattaaagacagacataggaaattattaagagtactgattggggaagtgataaatgtccatgaaatcttcataatttatgttcttctgccaaggcttcagccagtccctccgtttggggtctctgacttcctgcaacaagagtctatttatataaaatatccagaaaaggcatgtctacagaaataatgagtagatcagtggtggcttagggttggtgggttgatgggtggagttgtaggggagggtaggataactaaaatacaaagtttctttttgatgccatgaacatgttctaaaattgactgtagtgatggctgtacatgtctgtgaatatgctaaaaaaaaaaccactgaatcgtacactttaaatggatgagttgtatagtatgttgtgtctcatttttttaaaataaatagttaaaagacaactaaatttgcactggccaactttttaatctaaggagccatgagtattagaggtgaaaattacacacacacacacacacacacacacacacacacacaattagtgatacggaagtaaaaccaggaagttctaagctaaatagagaaagatatagggatttttgtttgtttgtttaataagagtgctggttgatattgagaaaaagacaacaaaggtcaagtgataaacagtaagtatttacaaatcaaagttgtaaacaaaatgcaagcgtgtaaaacaagcaaacaaacaaataaaaataacctgtcctgagctgggaaatgaatctaggatgcagatcaaaagcattcagcaagttaatgtggccaactcctagacctgtactcggtgaatatttgaattcaaaatattaaatggagaataaaaatgacctaaaacaatgctgtaagaaatacaagtataaaataaggctaggctgaagcttctctagaaaatgtaagaggaatgtcaaaggaattttgacaggacacatttgttccaaaaattctacatatagttaaattgccaataatttgtgaaggcaactgaaatattttttgactctttgcgtacataagcatttattgatttaatttttttaaatacttagaaacaaaaattagcttctttaaagataattttaaacccttagtaactaaaatatgagcaaatttggtttactgttaaaatatatttaaaacagaattgtaaaagattattgtatatattattacaaaatggaatgcaaatgtcaaaactaattattaaaaaaatgacaaaactagctattaatatagtattgctaaaattatgttttaaagttagaaaaatgagatgagatagagatgatgatggaaataaaggcatgaaaattgcctgatcttatacaaggaggaatcaagaactactaaatttttctagacaataatacttagaaaatacatctatagaatggctggtaacaactaactagagttaaaaatagaatggaaagtttacactacagaaaataagcatacaaaatatagtccacataccaaaagatggatcataaaacatataattatgatagaagcatgtaaaaaacataatgcaagactatagcatcttatgttatataactaaacataaatgagctaaatgatcctataaaatggcaaagattttcagacttgttcaaatgccaaaatcaaactctgatatctttaaaagagaaaaagggaagaaaaaaagtatagcttcaaagaaaaattttaaactattatgttagataagttaattttatattcatagttgacacaataaagctataattttttatggacaaatattataactgaaatatagaaagcaaaactaattagaattacactagaataaatctggactaagggtaatacgtgaaatattcccactatcactgtttttagcttttacaggccaaatagatcaaaagataagaaaattgaggatataatcaggttgatttagtgtatttttactaaactttgtaacaacgattacaaaaaaaaaaatcaatggccaaaaccatcaaatctcaatacatataacaaagtataagctgtataacctacattttaaaaattaaatacaatgtaatagaggcaaaagtaaatattccagaacatcaaaaaaattttgttaagtatcctataactactaggtcaagatggaaatcaaacttagaatatgaaatattttaaaattaaagaatatttgagaatgacatataaaaatatcatgtcttgaggccaatgctatagagacaaattcagagcctttaatgctattattaaatacaacagaattataataagtaaaattaagtattaaaagaattctttttttaaaaaaaagcaggatgaaaagtgtcagttaatgaattagcaagaggatatttagtgaattgttaaattcaagaaataattccttgaaaaaataaacttatgacaatataactgaaaaaacacaaataaaattagaaataaggagaataaaatgtcagatacataggagaattaacagtattattccagatactctctttaataccaatcactggacgtgaataagaatcgctactgtttttaggcaaaaagcaaagtagtaatcatctatgaagagacagaggagagtattaggaaaaaaggaaaattccatgttccttaacatgtaaataggccatttaatgtcattttttccagtaaaattgttgtttgacatatgtgtaattgcagatttgaattggactttttaaaacttgataaaattatgctaaatttcccctggaaagagttgtacaaaattgtcctctcatgtagtatagtaaattttaaaggtttcctaaccaaatattgtagacaatgtgaaaaattagaagatcaaccagaatggatttatgagaaccatagcttagtagttataagaccttaatacaaaagttggcaaatctggctcttgggccaaatcttgctctgccatccattacttttttaaaataaggttttgttgggacccagccatgtccatttgtttatgtattgtctggggctgctttggtgctaacaaactcagagttaagtagttgtgacagagactatgtggccctcaaaggctgaaaatatttaccatctggctctttacaagacagtttgctgatccattccttagtataacaaggaaagcattgcataccacagggaagggattttactcaatgaatgatttgggggaaactggctctctgataaaaatttttcaacaatatggtaatgattaaacaatggttctttgacatgactcatattgtacagacatgaatattgtgctttcagataatatttaatggcatggtaataattatataatactaaaatgttttttaaaagtaggatccccaaaacaccatgaatcacaattcatgttaaaaatgcatacctgcaaaactattggctagggaaattaactttttctgtatttaaaatttaattttaagagtacccacttttaaatattgaatctttatggtactgggttttaagttttaatattacttttaattggctttttcatactaatgattccttttaatgttttcaattatcatatgtttataaaatgtagagatcatttttattattaaactttataatgtacactgtttcataatataacaaatcatgcacttattactttttgaattattttttaaatataaatcttcaatgtttaatggaaagttatcagaaaatgatatcctgtttattattatggtcactcatttatttctaccataaagtattacaaaaagtacataatgctctgatttggggacttccagagggaaaaataatgcatacctgaactgatagacgtatttatgtgaaagtaactgtaagtagtacacaaaatttctacttagtagttaattcttggttttagaatttggggtttttttcctataattttattttatatattttctgctgtgaaaatacatttattttaaatttctgtaaaaaagaaagtaaatgttactaaatagttaaaggcaaaaaatgtagccacaaacaacttcacaaaaatatagcaaactgtttaatctcaagatgcttgatagttctcatgttcagcatgcactttttatgcataaaaactgaattcactatataaaatatgtatttacatcattatatacagattaaaaactgatatgcttcaaaactatcataaacacaattaaagggcctcctaggaaaaatgacaatcggcatttgccataatgtatgagatggctcagtatgacgagagtgtggattggtaaaattgtttcttggagatatcatgacaatatgtatcaagaaattttaaaatgtccctatttgttaaaaaaaaaaaaaacccagtacatttgcctcaatataataagttgctacttgttcaaagatttatgtacaataatttttattacaggattaatcattgctataacaaaaattttttaaagctaaatagccaaaaatttagtgataaatcgattctggaacatccacagactggagtctcataaagtcctatggaggctctgcaaatcatgacacctaaggaaataataaaatactctggataaaatattaactgaaaagggaaaaaataaccaacctataaaatgagataattctgtatttatccatccatttagaaggaaagacaccaaaatattaaccatgcttatccttggtgttggaaacataggccatttatattttcttctttatatgttttctttttatttttatatgtttcttctttatatgtcttcttttatatgtttctgtgctttccaaattttcatcaagaagtatgaataactgttctaataaaaacacagtcaattttttttaaacaaagggcactataggttatccattgcaatgataaatctagaaggtcaggctgggaggttattgttttgtcaaatctttgggatttgaccctaacatgttcccacttctgtgttgaaatcagttatacccaaatctttttgatcagtcactgacatttattgagcacctactaatcgttgggccttggtttagcctgaaattgtgtgaaagtcaaagagtgcatgacttttagaattgctcatcaacaggtacaatttcatagtcagtcccagggtttcacaggtgtctgaacaactctgggaccactcatatctctgagcataattgtctgctctctgagctggcactgcatcccagatgatggctctccttgatttttccatgcaggcatccaggagcagagctgtggggcagcagaatctgtgatgacagagaatgatgatgtatttttgccagcagatgcttttgctcctgttttgataccccaatattcggatgcagaaaaggactctgagcattgctgacgggtgtgctctgcacacctatctcttcaggatctgaataatttggtggaaagacaatgccttttctggaaaagggtgtcaggtcagtcatattggaggatgcaaatttccttatgtgatgggagtgagggttggggtagggcacttcacggagcattcagcagtctgcaattaagcatcactccaaggctttctgcataggtgatggctgtttctgcatcatggggcaaaccaggtgctagaacttcaaatgccaattaccaaaggcgcttcctgcggaggaaacctctctacaactcacctgacccagaaggcacacatttttttctgggttaacataaatgctaaaattgaagaaatgaaacattctaaaggcaggatcatgtaggtgagatcctttgcctcctaagcttttgtcctgccagtcttttctgtgccttaccatgatacctgtgctagaagtcttctgggaagctcttgtatagaacctccaactctggcagggttagtcttcagggatgcttcaggcagagaccttctcaatatctatccttgcgtcacatgggcattgagtataagacagctgagttagggtcctgttcagagcctgggatcagggaacccgcatagtctaaggaatacaggagtccctcttcccactgccaaggacaagtttgcaaacctgactagcgaagcccttcttctgattaaggcaacgtggccccctggttatgagtacagatttccaaatccaattagtgtggcttttaatacctgctttgctatccaataggcacaacaatgaaaaagttgcctaacttttctctgccttgaattcctcatccatataacagagatgaaaaaacaaaacaaaacaaaaatttatagattagagttaaatgagaggatttgtgaaacttctgatagacaaagcatactcaaaaaatgggagtttataaaaagaaccatcaactagcaatgcaaccaatttagacaattccctctccgggtgtctcggcgttctgattctaatctctgagagctggctcagaacacaagggtggcccgcttggcctctaaagtttgatgattctcaggtcctgtaaaaggacactgaggaaaccatgaaatgccaggggagggaccaaggcactgtaacagggaaacctgagcccacagcgccatctagcccgcttggcccacgccccgctgtgcctgcaagtgtaacccgcccaagcatcctcctctttttatttttttaaagtataattaccggagcttatgtttcacagttaatgctgtcaagccttttaaactaattggtcttttatagaaaatttaactgaaaattaacacatcttttaataacattgccttaactttaatggctctctgcctttcgtttataattgctctaaaattgtcattttccatgtcatagctgccattttttatatttgctagttttcatggtgtagatttttatttttagtatttttctttcgtgagggatgaaaatgattggatttttttttccctaccccaggcctgcctggcctgatgtgacagcagtggtctgtcctgagtctagcaggacatacctccatgtacccgactgacaccactgctagctcctctgcctcgggacggccatgtgccctctgtctccgtgtgagcagttgaaatggaggctcttgagtggagtgtaagaaatagggttatggagcaataaattgtttatgtaactaaaatcacatggcattaggttagcttggactgatagagaactcaggcctctccataacaccaggttcaagggtttggcccttaatgaaagtacaggaaagacagtaaatcatgtgaacccacattccagacggtcacaccctccagtcttactgatataacttcgtttctggcaaacaggccagctctctgatattaaagatgagaacatggaatcatatcttctgggtaccccaactcatctacccactaagctcccaaatattatctaagatgtgtgttcatgaaagagagaaagagagaggataagtgcacacaaacacataaatatatatacatatatgtacatgcatatataccaaaaaaatctgcttctttgtaattacatgtgatcttaagaaatacgtatctgctctgtgaaagatttttatatgcctttgccattctccaattagcagaaagtcataaggagtaacatcattcccatttaacagtagaaaaaatgtgcaagggctgccggtgagccaggaccagaagctacaagtcctaattcatggcccagtttccctcctccaagtcactgcctttgttctgaaaatatgaatgcactggacatgcaaactcctgccctgggcattgtggtgcagtgggcagagcaaagacacacctgccttaactggctcacattgaaatttctctctagctcctgggggatcctgcgcatgggtctctccataggctggcattcacgcttctcagatgtatcgtacactagcaaaaggggcctctgcttttctctgctctttctcttaacactgttataatatgctttttctttatttttccagattaggtaggccctgcaaacctaaagcttcattaaatcttgttttctaaaaaaaaaacgacaacactcccaacttgtgtgcattggaactcattagctcttgtagtagggttcccctttttctcctcagaaggaggtggctcctcactgctccttcaataacgatggttcagtgtgattggtatctgtttaggaaaggtccaaggctcaaggaaaatggacatcatgtgcacaacctcctaactcagaggacaagcaagtgaccggaaggccaaggatgctgtctgaccacagacattgcaatgcagacacataagattagaagcaaaacgcaggaggctggtaaggccaggacagtgggatgaaccaagcagggaagggacatgaatgaagcaggcctggtgggatacaatagagagtagtgtggactgtggctaaagggagcagctgctcagctcaagccaatagctgctttacgggaatctgggactctgccttctgactctaatttaaagaaggcaggaaccccgattttatataaaatcttattttaaaatattggcaacaaattcaatttaaaaataaaaacttgataaatgcagaagttgtctgtggggtagatgtagactgcaatgtgacatttcgagacttctattacagatcttttattagaaacaagatatcaagccaagtactatgccaatatattgtgctatttcttcttctaaaatgagtgcatgaggatggggtgttggacaaaaaaataatcaagggttgcgcttcaggaatcaactcagtgatgagctcactgtcctagccagcgtatccagaaacagtggcattaggaggaagctggtggctttcagaagaaggaggatcctctcgccaagtctgaagtgtctcattccagacttagaacttggccagatgtggtctattgtactcggaatactcagtgtggccagcggccttgccttcttgattgccttcctgtctaccacattccaaccataatggcctccaactgcttcctccaacaaaccaaacccagcttgtcaccactgtgcagctttggcctttatagtgttctctccctctgtttttttcagtgtcagcttcaatgttacctcctaggataattttactctgaccactgagggtaaaacaggtctccacacccattcaagctatttcatgttcttcaaatcaattatccttatgtgacactattcatttattcacttacctatttactcttaacccactagaatgaaagtttaaataacatgaaggcaaggtcttcatccttcttttttacaactgaatccgcagcatggggaatcatgcctggtgtccagtaagtgcccaataaatgtattgattaaaaacactagcaacaataaatacatacagagcttgtcaagtgctaagcaccgctctaatcgctttacaacctttacccatttactcatctctgcaaccctgtgacataggtactattactatcttcattttaaagatgagaaaactgaggcacagggaggttaaggttacccagccagtaaacagcagttctggaatccagatctaagccatctggcgcttgagtccatgtccagtattcacttttcagggtccaagtggagcttaagttggggctggggttgggagaaagtgatagctggatgaaaaagaaatctgaatactcatatgtgagtctcatccctaaaaacagagaggattcctttcacctggtgcgactgtgtgcatcaagatggtatcattctgaaaaatacatttctaagttgtgatcttcttagagacatatatccaaaaacctaattattccctctcatcctgtgtttctgctgttgatttgtgagataaagccacagggccatgtctgtaacatcctgatctgttccaggaatgcctgtgatgaatcaaaatattattcttttaacaaatgaagcagtaagcagcaggagttgggttatgaaggacaatattcagagaatgtttagacacatgattaaatgacaatttggggaggagcgctagaataaggagactgtcaacagctgaagagatttgtgtgtggatgttgtgatgttgcttatgagtgaatgcctgcaatgaaagtttacctctgtctcctgctgtttggaggagtctcactttctcaatttatattcatgacagccctttttgttccttctagttactgccttggcacttgactaatctgttttttcatacattaaggttggggtagaatgcaaagaaatcacaggtaacattttaccaaaacgtctggatccaactagatttgtggactcagaccctactcaagacctcattatgaagcttgttcatcctagacaatgaaaacaagacctggaataatttgataggcattttgattaatgatttgaaaagttaccatcaatgacttacttaaatatgtcttgcttcaacacttaaaccaagagtattcacattattgtccaaaagattcgatagtgtagctaaagtgcctcgcacagttctgggcccttagtaaatgatgctcctgatgataaatacaatgacagttaccagattcctgatacccttttatcctaggctagaatgcagaagacatgctgctcccatactattgcatccaaacatgccttagtcacactatcccaaacatttttgtgtgcatttcaaaggagatgagagatggcttgtttaaaaatttcaaatcaattcactttgaattctcatttgaatttccaagaactgactacctactgatgatatagatgcttgtgcaactcaaatccagatgggcccccacctccaccctgtggctaccatatgcccctttggctgtgttgaaaagaagttctccagtgctcaaaccgattttattccttggaaccagggctggtttcatgggtgttcagcctatgtggttgcacagggctgtactcagacacatctctgttgttttattttattttattttattttttgagacagggtctcattctgtcacccaggctggagtgcagtggcgctatatcatctcacagcaacctccacctcccaggctcaagcgattctcaggcctcagcctcccaagtagctgggattacaggtgcacaccaccacacccagctaatttttttatatttttagtagagacagggttttgccatgttgcccaggctggtctcaaactcctgggctcaagtgatctgcccacctcggccttctaaagtgctgggttacaagcggtagccaccgcacccagccccaagtctcttttgttttaatactctgctgtcaccattttgaaattcttaataattcatgaaaagtgaccttgcaaattatgtagccagtcctgctagaaacatactaaatatctgatatgtagaaacataaacaattttataaatttggaattttaaaaatgttatcagagtattttgtagttctgaaaaaaaaattctactgtaaatagtttaaccagctcttagaacagtcttctgagatctctgtaattaggatcagaactaaaataaaaatttctaatgagatgaattaccaaaatccatttgaaactggatttgcagaatatgaggcctatgactgagaatatggtcttcttaggaacacatcttgaggcttctatcattccttctggcttgctcaaggagtttgcccaaactgagcccaacatcactagcaggtagaaaggttagccttggtatcatcaggccataagaaagatcatgagccccaggaaaccaagggagcccttttccaaggaccattttatctccttgttggcttggaaagccatggcatggcatgaagcccagttaaccttaattcagacgaatgtcatttcacagtcatttttaaatccaaaattctgatttttaaataagatatgcttgcagttggacaatgttcaggcatacagaataacccaaattagtcttaaaaagctttatgttttttctttcctcaaatagaggtccttctgggattagcattatttaatgaatagatgagaccagtacataattagcatatcagttgtttagcacattcaggagaataactttcagcactttaagaaatatacgtgtgtaaaaactctgagttctgtttatggttttaatgtgttcagaaaagctctttatcatggattctccaaaggtcaagtttttgttcagcctatgtctgcattttcacaaattgagaatttgagaactccaaaatgaagaagattttctacataataaataaagatgctcagtgggaagacttcataatacccaggttatgactcattctaaatgcctacttttgccttttgcagtgaaagatggctccataatgttgggacccattttttaatcgttatttgtttttcggttgcaaaagtgaaaaaacaaatgcctgattgctagatgcacatcaagttataaaagaaaccaaagctgtgtttgatccctgggccagcccactgtcctctctctgccactaactcctccctccttccagccaggccttgcctccatgcctggttctctcccaaggacttcagtctcagtgacaggcctggcagtcatctttgacccactgtcctctccaccttctgctcatgctcaatcttttcccaagtcctattaattgtactgcccaataccactgagctccatccacctccctcgatcccaacaccagctctatcctagtccaagccatgacagcctcttactcagacctcctgccgccatcttgtacctctgaatcatcctccctacaacagccaaggcaatccccttaaagcatgaacctgattatgtcactctccaactaaaatccttcagtgcctcttcattattcttaagaaaaagtccaaaaccatgaaaatgtgtttcaaggttctgcaggtctaaccttggccatcctcctgcacccttgtctccccatggtccagcctcacagggtttctttgccttctttgagagcctcaggtcccccccaacaccaggttttgcatttgctttctttcttcttcagagaatgctcttcccccaagatctcccctctttatggctcaaattttagcataaaatgtacaactcccttggggaatttttctgggatccccaaaaccaggtcaagccctcacctatatttccttctagcctgccttgccttccttgcacttgaggaatttataatcaaacatttacttgtgtgatggttttataatgtgggtctccccttctaaggtgtgagcttctaggagtcttgctctccactgtggccccagtgcagcccagggcctcaaaggttggaggtgctctattggcacatcctccacccttgagtgaggaggagggaacaggataactcaccgcgctcatgagtgagtccaggacactgacggcaaatgctgtcccacaggcaaagggctgcgtgaggtacagttctgtatcagggtcatcatcatcgtcttggtccaaaaactgaacattagtatcgttcactagaaaaagcataaaataagaattagctctgaagaccacacacaggcattgaagccagagggagaccaggctactggtttagaaatactgaagtcattgagaaggaaacaaaagcatggaataagctgtagatggatctttgggtaaggggggcagtgggactcaatggactgttcctgtgtcactgtttaagtgtctgagacctggagagcaataagttcaagcaggcttgctccacggcaggccactggaggaccaatagactgtgctggccagtcctttggcatagctttaggatcatgacctaaaaacactttccagtgttttttggtaaccaagtcctttgagagatggacatatttcaatgatgagcagccatgctgggatagtcattttagccacaatgaaaagaaagcagcttattgggagtaaagagcgctggaaggggagcacagcaaaggcagatagcaaggaattcagccacaggcataacccgcagcctacccactgggattggcctgggtagttcccggggtcccaggccctaaatctaggtccacacccaataggccctgtttaatacacaggaaaccccaggtgggatggatgcctggctgtctcctgctgcttgctgacaaggacttgctctgaattttgagttgcatggggacgcccacgttctccctttcccatcctaaacagctcaatcttttatatgcttgcattcaagcagatgcagcattggatgctgtatttcatttccatctgaggattcctcaaggactcctcccgcatgtacgtgcaggctgattagttgtgtcactcagatgtctttaacttattaaaaattaaatgacaaattaatttccattcccatcttggctttggaaattatcagttttgcagagcaagtaataggggaaaagtcggtggggggatgggagaagggggcactcaaaatttctgaaataattattgtgattttaggaagagaacagatgaggtttcctttccctgattcctttctaaatgtatcaacagctaattcttttttctagagtgattgttttaatttttaagcaactttcttgataactcttcttttttaaaaaaaaaaaacttttgtttactgtatgaagcagaataaatgatactagcatgaaaggctaggcatggaattagtattttaaaatgacatcatcttgtttccccagagaaaaattctaatggggaaaatctttgctctgttcttccaaaattggtcacatttgggtccccattgtttaagcagcaattgaattgcaggctagtggtgaaagtccaaaatccaggctctgacaactgggcttcagtccagcctgtgctgccaacttccttgggcaaagcatttcatcattctataccttagtttgtttctgtaaaatgggggagttacagcagctctctcatgaggctgtcaggaggctcatacgaatgggatggtgcccagtaagcctggcccagcatctggatcatgccatgacttgataaataccagctgctgtcatgatctcccttctgacattaaatacctgtccacccattatagcatgaaaatacccagcttccctctgcctctcttggaaacactgaaggtcttgctcaggggtctttcaagaggtagcttttcctcacctcccttcacttgtccaaagggatgttgtaggccactgtttagtctttctgttttgtgaatcagaaaatgtaaactggagaccacatatggaagaatgcagttttagttacttgtaatagccaccaatggtgtgtgtggcaatgctccgaaaagcacagcatctgttacctcttatcaggaagatggggaagggttggtaccagatatggaggtgaagtgactccaagtagggggaggggactcccgattgccagtgagctagacatctggggtcataggaaaagcgctccaagagaccagccagggtccagtgaataccttgtataccgttctgaaatacccagtctcagaaggagagcaagcaatgctactcaaggcctatttcacagaacagtaattatgtgggtgctaagaggtacccacgtaatcaccccaaagcatatgtggtcaaatacaattggaatagtcaggtgaaacagctgtaacacagtcctttcttgtgagactctgaggagcctttgccatgctaacatcaattgagagtctccaagtagatgaaaagtggaatgtgctacacagctttgaaagcttgtgtggccttggtgccctctgtgtctcttaaaattcattatactggcctggcataatgcagaacacatctcagaacatgtagataaataagaagtatttgtgggggatgtgggaggtgaaatggtctgaggagggtggtatagtggctagagaaataggtttcaaggcagaagacaagggtggtgtgagcacctgaaagattctctgaacacaaggaagaaatctggtgtgggacaaaggcttcaggagagtcaatgatgctaatcaaataccagaattgttgccttaggtttggggcaccaagcttttccttttctcgtctactaatgacaaattaagatatcctagttagtcagcggcacgtgaattccaaatagaaaatgaaattcccggcagtgaggattctgaaatgctgctgtaggtttgtgagatggagatgtttggattaattttccaaccagaggcgtggaccacatgagccctgggtctcttattgccctccagttctgaggagagcaatccagaaacctagggcttttaaacaactacactaaacatgaaaaagatacccctcctatggttggaaacagaaaatagtgtgatactccctgacctgagtgaatttgtcctgataaatagctatacctacaataatgcactgctgagtggtggacaatttattccttggtttctagacatctcgcaagcaagattactgtgttgaaagcctgctcccttattttgaaatatatttttgggccaagaaaatggggtgttcatttcatttgtgagtcatgtgaaggcaggtgctcccacctctctatccacccctctgctgagcagcacttttgctgtctctatttagaagatcaatccccagttctgagacttgctgctgatgggtgcccttcatggagttattaaccaagtcacggggaagtggggaagaacctaacaaatgcagtcacgactggaggcctttatcgtccacctgagtccattgtgaatctcccagagaggattctgggctgggattgggggccagagtgcagggctgcacgtgggtggctgctaaccttatcctccgcacccttcttgaaatctgcctttagtaaaaaaagttctcctagggaccaggtgtttttatggcttcagaaccagagcttctgagaaatgccctagtaggggggaaaaaaaaaaaaggcaaataaagtcagaataaagaaaaataaacagctggagggaaagtgccatcttaggtttcttatcttaaaattttgatattctcctttgacttcctctaagagctgtgaagacatgtcattcaaactgacagtatgttggaagaggagtagaagggagaaggcgggagagcggggtgacaaaaaaaagtggggaaaaaaggctcaggccagagaaaatgaattagagcaaatatgctttggaaacaactgccaggtcagatgggtgtgatcaaaggtttactgatgctgtgtggggaaaaaatcattaagaaaggccagaacaagacagtcgattccaaccagagccacaaataaaacacattcaaagcagtgccatggggtagcctttctgttacagccggtgaaataaaaacaagctgatgatagttggaaacaccaacaacagaacaaaaggagatactgatgtgaaggaaaacagtgcttcttacccagttcagttatcattagaatgtgcgtcccactgtttttttcctgattgactgataccaaaggcaacttgcccggtttagctaattggatacagcatttaagggttggggaaagggagtggaggaaagtacagaaaaagaagagagtgagggaataacagaggaaacattctcaagtaaagggaccccggaccacaggtagtttgcatttgtcttgggggaagaggccactctacagttttgcacactcactaatggtaacagggagtgccatggccaggttagaagttagattctattgtccaaccaacatggccctcaaaaccccatcattttgggggccagaatggcatttgctgaaaatggcttttggctgagatattcaactacgatacgttaaatgtcaagttattacacattagcccagggcttctaccttgttcccaaaatgggtttggcttagatccgaggctttgtatatcagtggaggactcagattgtaggagctgtccagacagaatgctcaaaagaggttcttacagtaaaaatcaccagaaagaatccgtgaactaagcctttcctcctttcctctccattcccaattgaatgccccaatcgcaaatccatcatctcatgctcctttgaaaacagtgaccagcatgaaggaaactgtctattcatctcagaagaaagatagatcagttttcccttccggtaatctgccatatttctccccataccttcctcccagccccctcaaaacaaaccccatagcagctacaaagttgaaagggctaagaaataaaccaacctcctcatatcctgtatggtttgaaagacagaacaaaaactccccccaaagctgacattgacccctacctagttcagtgatgatggggatgttgaccccagttgtgatggatggttgacgtaacatcccgtgcactgggctgttatctggagaggatctatccattcctggaggtgtgaaccctagtgggaaggaaacagaggaggaagaaaaatcagagaagtagaaaatttggaaataatcagagtacactatatacatacaaccccaaaaatgtagcttatgcattattcacaggtcaacaattagtattcccgggataaactctgatgattaattctttagaaggacagggtaggaaaccattataaataatcgtaactcacttcatagttccctaaaaaatccagacttcataccaattatttattctgctcatagatcttggctcccatctctttccagggacacaggagaattatcccctgtgcccccttgaagttaggtatggccatgtgacacatgaaatgctctggcccatgaaaagtgagcagagcagtgcatatcactgctggttcaggtattggacagccatctctctcttcccaggccatggcaactgtgagaatacaggttactatggagatgaaggctagacaacagccctggacagttacccagacccacaaagcatactgagtgagtcaagaataaagctgtgttgctttaagccgctgagatttgtttgtttgtttgtttgttgttgttgttaccacaacataacctaacctggcctgactgttaccgtaaaccaatcaattgcttatcctcttgctggtgagtgacttaggcctcagttttcacagagttctggccaatgggaggtgtcaggaaatcttcctggggctttcaggaagtgtttccttgctcttaaaaagaaacacataggaagagattctcttttaatttactgagcacggttttatgtgcctgtagtgccaggaactgaggcaccagctgagggcataactaacttagtgatattggctcaagtgaatgacaggaagagctgtcctggagttcctggggcaagcagcctggagccatcccacctcaggatttctccctatgtgagattttatacacataaacacacacacacacacacacacacacacatacacaaatgtatttatacatatacatacacacaatataataagatgttcacatttttttctttctgtttaagctaaatggagaaggagtttacttgcatctaaatcctcctgactaatgtatatgccacctgcttatggctgatcccttgaacttcccagtgtgccaaacacagaccacataaggtatatgtggacacaggaaaattggaaagcagcctgcttggtctctgattttgcagtttgggcttctttgggtcccaggtccaagccaagtacatacctggatgaggttggaacaactgtaactttcagtttagtgagagtgagaaatatcccggctaggcagaatgtctgcctcgttaaggttttgcatggacacatatcaatattagaaacctatttacttcctacattcatctggtaaaaattaatttttctaacgaagcatacggcagctccacgcaagtggcaagacccagtgcaattacatttagatgataggcaagcattcacactcacttcggtttctccttttttccttcagcggaatgctacatgggcttaccaatgaattagggacttttaggaacaaagtcacttgctaaatttccaaggataaaactccaaatagattattatgtgaccagatatctgactcactttccagcaatgtgacaagattgtgttgagtctggcattttggctaggtgtgagtcaggaatgaaatacgggagctcaataattgcctgttgttttggaggtgcataatgcataaaatgccagagaaatataaaagggttttcttactttctgctctcccgtgtatacatttcttatcactgagtgccatactttcaaaaagaaagacaaagttttacttaatatccattccctgactgcacttaaattgattctttacattaatacactatgaaaagggtaagtcattttgattgacattgtagtgtccatcttttcaaactttcgaatatatgtttttcagccaaccacataaccaaaaacacgcatttttaaatgctagctgttttcttcttctaggatggtgaaggggaaaactaaactgttttcattagaagtttcattcaaaaacatgaaaaactggaagtgacagctgtgcagattcagtggatgtgacgtttttgaatttcttcaacttgacaagtaaacaccttaaatcggtaatgctatatgcataatacatggcctgtattttgacatccatcatcaaatgctgacttgagaaaatacgggtttgtacgtcaaggaatagcacccataaagcagggagaaatgcaggtcacacggtattaggaaaactgtatttcattacagaactcgcaacaagccacggcatccttttattttatcttatttaaagattccattttcagctgtgaaaagactcaattcctttgcatgaaaccttcatttggaaatgacatgcttgcttcataggcttctttcattttgctttcatattccattttccccttcagtcaccaggcctggttccattagcatctgcaactgacaaactatggtaggtgtccaaagacatctctctgttgaaggcccaactctcccctatgcatgactccccaaaaaagtgtgcttttattgctaagaaaacttcatgcctctttttgtttccctacttttctagtcacacatttttaaaagcaaaaggcaacaataacagcaaagttggcttcttctttttccctggtgtagagttatgttaaaggtgaacataatttattagcattgtttctttcttaggggtactgatatgggaaaattatggtcagaaacggcaggattgccccagattccttaaatggctttggagagaagagaaattcaagcaccttccataaaggaatgaggcaatccggcctttgatgccataggatggtgtccaccgcattcctcatagctgcatttgataaaggggcaggtctaaattgtggcccaatctctgaccatcttgctctccttcccattattgcttgcagccatgactatatcatgggtagcacctgaagtctctctacattaaacaacgccctagttctgcatgtgaacacactggcacatggaatatactccagagatctacagctagagaacagtgaaactgggaaacactcccttcattagttaaactaacacttgggaagttaattttagaaacaaccacttattttgccagaaaagatgactaagaatatcaccattagagacatggaatgagaagtcctcaatcaggaaaagactgaagtttaaatcatccacagccaaagctatcaccagatgggctcctgattctttagccatgtacccatagcactttgttgatcatggccatgggaggcaagttttgtgctaaaaatgacttccatatgtttgttggccatttgtatataacatcactaagtatcaggaaaatgcaaatcaaaacacaatgtgataccaccttattcctgcaagaacggccataatcaaaatatcaagaaacagtagatgttggcatggatgcggtgaacagagaacacctctacactgctggcggcaatgtaaactactacagccactatggaaaacagtgtggagattcctcaaagaactaaaagtagatctaccattttatccagcaatcccaccactggttatctacccagaggaaaagaagtcattattcgaaaaagatacttgcacacgaatgtttatagcagcacaattcacaattgcaaaaccatggaactaacccaaatgcccattaatcaatgagaggataaagaaactgtgagatatatatatatatacacacacacatatatatatcacatcacacacacacacacacacacacacacacatatatatgtgagtgaatactacacagccatacaaaggaattaattaacagcatttgcagtgacctggatgagactggagactattattctaagtgatgtaactcaggaatggaaaaccaaacatcatatgttctcactggtatgtgggagctatgctatggagatgcaaaggcataagaatgatacaacagacttcagggacttaggggttaagagtgggagggagacgagggataaaagactacaaatatggggcagtgtatactgcttgggtgaaggatgcaccaaaatctcacagatcaccactaaagaacttactcatgcaaccaaacaccacctgtaccccaataccccaataacttctggaaacaataaaaataaaataaataacttccaaagaccacctgaactccttacactgtaagttttctccccactccaatcttcagtggctggtgtggcaggtttttgttacctattttattcattcagcatgagacataagtgcttgaccaactttatcctatgacagatattctcattctatatactgtataagaactttaggtcagagactggattttcatttctttgaacttcccagattatctacaaaatgcccagcacatagaaaagaaatagaatgaaattgttaacagcatgggctgtaaagtcaggtgtcctggattcaaattctggcacctccacctataagccatggcactataagcattgtgcagactctctcctagtctgcttcttcatcgataaaccacaaatacctcccacataggacaattgtaaggataaaataaaataatgtatttaaaacatttagtacaatatctggtatgaggcaagtgctaaaaaatgctggctaccaatattaatattttattaggtatacaataagtattcgtggatcacttccccttccctatggataaagaactgaagaagtatttagtagattcttaaaaaagatttttcacacacagaaaatcctagaatactaatgagaaggcaatgagcattgtgtgtgtgtgtgtgtgtgtgtgtgtgtgtgtgtgtgtatatatatatatatatatatatatatatatacacacaatattccttatgtgatcataaggaaagaaggactatggctcagacaagatatacacaagtaatggctggaaaagggttccaggacactgtaaacccaagtgcattggaaaatgagaaaggctcaatggcattgtttttatgagactcaaagcaaaggcaagaatactctagacctaaactggttaataattgagaatgaagaagagagggggaaggctgaactagaacccaaagaaaaaaaatagccaacacttactgagtgcttactatgtactgaattttgctcacgtaataacttcggttctcagaaccatcctatgtatatactactatttttcagaggaggaaactgaagcacagagaaggtaagcaacttgccccaggacatacatctaggaattagcagatctcagagtggaacccagataaacaagtcccagtgtctcctctaagccaccacgccatattgcttcttatgtgccaggctgggctaagggttttttcatgggccaccttgtttattcctcataacagtccctgtgtgtttagggactgttgatatttgcattttgtagaagaggaaaataagattcagagcagtggcataactggctcaagcatacccaattggtaagtgtccctgggagccgcagccaggcagtctgacctcagactcctgacacctgcaggctgtgccgcatccctgacttgggtgctggccttctccttctaggtactgtccctggcaggcaagtctgaggcctgagccagtcttactttttattgttttcacttttaaacaatagcagataacaactgggacccattgtagttatgcttaacttgctttggtatggcagcatgcacaactcagtacatataataaatgctttattacagtacttttccatgggggaaacacaaagtactttctaaatcttccctagttaaatccctgagcctttccagggagagagggagatggaaattcttatcaatcatctcccctagaatagatggagaaatgaaggtaagtgcttctcccaccccgatagacttaacataaaggaattggttcaaatggtgggccaaattatcttttattgtgtgcatataaatgatggttagaaatccatatgctacgttaaactagggaaataaattaggccgagtcatctaggtttgctgagacaggtattcaatatgaagttgtaaaagggaaagatcacctttaaaaatgatctataaagacatgttaaaatcaagagaaacatctcatattacatcatctatgagatgaattaaatttcctgttaatgccagggaaaaaaacctcaaaggcaaatgtcagatgaagtgcagatcaataaaaatattttgataagtaaatgcaacaatgctatttaacacatgattggcaactgctgaaacataaattatccaaatttcccattgctgcttatgggaaaattatgcagattagaacttgattaggcttatatcatgagactcaatttggacttttaatctattaagctccaataaatgaggcatctgaatagctcccctgagcaactacggtaatagccacagcagtcatttttgcagtatgtattccaacgaatgcttcagcagctgaagtaaagaaaattccatgtatagaagcacaattgctttctaacttgtaggggaagaaaatccacacacaccaggttgatttgggaaacaggtttttggaaatgactgcaagaaaaatccagccaaaggaaaaacctcagtttaaccttgtaatattttttcacagtagttttcagtggcttcctatgaagctagaatccagagtcaggaaggccaggcagctgaccatgtttactcaataaaaaaaagattatttaccaaggcagcagcttctcctgaaactccccaaaggccaccccaacagggtagaggtagcccccaacaaggtgctggaggtcagtgtcaaggagggaagcggggaaatgcccctgccaatttgtgactcccccgcacaaagcctaatgacagtgcttggaaactgtataaacagataattctgtgactcctgagccaaaccataaggtgtcttttgcctcttcagcaatcattctatgctagaaacacgagagttttcaaaatcctctaatcaattcctccattcttcaaatgaagaaactgaggcttagaatggagaagttattatatccaaggtcacagaaccagttagcagcagaaccaggatagttgatatctgctgttttctgttcctttttaactccttctatgcataagaaacccattccacagtgtttgttgggggtgcagggaagaaactccgcccccaccctggaaacagaagtggcaacatgaagccaggcatcctgacttcacagggccgctgatggtcctgcataatcctggccacatcatcagtttagagatgagtctgtcctcctcaatctagggcctgtccgtattctccccaggacattatgtaaaagatggtaaaggttctgtggttgcaaagtcaggagtctgcaggtgtggggctactggcaagcagttagcccaccatggggtgaatgaaaacagggcaaatgaaccaagaggtggagagaatgagatagagctctgtcattgttcaagttcctgcacacaaatgtgcctaaaaccagagacattccagttatatgtctctgtttttacttaagcctttttgcattggatttcacttgtgccaaaatgtcccaactagtacaacaactgagaaaaatctccattctcttcgcggtgaaatgattcatgctggcctgattttctactgaaacaaatgactgcatcttcatttaaggtttcctgcttgtctccagtgaccagggacaagacctggcttaatactctccttgtttctttctatttacagtaactaacagtgacatttttagcggtacatttttttagagactgtctttgattagcacctttgcaagttgactccacccactgaataaagtgccccatcctttttagagtttacattttgggtccaacccaaaccaaagcaaattaaaccaaccaaacaaacaaaacttctctatagttatttgcccattaagattcgtaaaatatattcagctcttagacaagtctcacacacatgaaacaaatatatttacaggacttgtctctccaagcagacagtctctttccttagaattaacttaaagatgtagtcccagctattcgggaggctgaggcaggaaaatggcctgaacccgggaggcagagcttgcagtgagctgagattgcaccactgcactccagcctgggcaacaaagcgagactccgtctcaaaaaaaaaaaaaaaaagaaaaaaagaattcgcttaaagagcttactgtgtaagatgtttctcagaagggttggttaaggggaggaaggaagaaaaagacaaagctagtaacaactcaaacacacctaaaactacagatttggagagaaacctaatattcacccggtctaatgtctccgtttacccaagagctcatggtatcattgctttctccacaacatctcaacttctcagttttaccttatcttaattcatcttacaatttaaagataaggccagatgcagtggctcatgcctgtaatcccagtactttggaggccaatgtgagtggattgcttgagctcaggagttcaagacaagcctgagcaacatggtgaaacctcgtctctactaaaaacaaacaaacaaacaaacaaacacaaaaaaattagctgggcatggtagggtgtgcctgtattcccagctacttgggaggctgacgtgggaggattgcttgagccagggaggcagaggttgcagtgagccaagattgtgccattgtactccagcctgggtgaaaaggtgagaccctgtctcaaaaaataaaatataatgagacatacttgcttggccagtgtggatcaaattacttataattttacctccactttggcctaagcaattgtacttctaaaaatatgtgtacagccataatttccttacattaaaaatttggctgccagggtcttcattcataggtattaagtaacaacattccactgaaaacaacatgaatgtccaattttagggaaattggttaagtatgcatccactaaaaataatgcagaaaaacatttcacgacagaaaaatggtcatgataaaatgtttgtgaaaaaccacaggtaacatactgacatgtatgatccatttttttgagggtaaaagtatttatatctatggaaataagacaaatatgtcaactttcttatgtctgagcagtaaaattacagggaatgtgcattttctttttggtttctataattgctaaattttctaaaataaacacattttatttatgtaatgaaaaaaattttttaaattataaattgatgttaaagaccctgaaatctcgaaacctcatgtgatctctatgggttgagagcagctgatgaacatgatggatggacacagctggttcatctgtaagggtctgacaggtctttgaacatccacttgatttggcagttaaggagactgaagttctgagatggaagtgatcaggccaaggttacaaagcaaaggggctttaaaagaacagggcccagagagagttttcaggcttcctagttctctgttatttcagcctcccaccatcttgtaagagctactcaatctcagagcagaggccatttacataaagcacacatgggcagtgaagagcccaagaaacccacaatgccccatgcacataggggaagggaggagcagtcagagctggtttccaacacagagggaaagtggcacctgctgatgcccatccctgctcccaccagccttacccacttcagaaacgctgttccccctcttccctcccaacccagctcctgtcgtttctttacctcttccaggacgtctgccttgaataacttctcacatttagttactttatgaagatgttttcctctgcctttttttccatcccctttattcgttattttaaaatgtatgaattattactaaatatatacaaattactacatattaatgtttaaatgttgttaagcatctttaattcttctgttttatcttcatatacccactggacttcccaatttcaatatggcacagcttatgctaacctttctttattgtttttatttattcttaattcctgttctgggaccctccctctttgctgccaccacaagaggacaaaggctgttttgccactaacatgggatctcctctttcatgatggatcacatttccagtaaactagaggcttactatgccagggaaaaggcagatatatacattacaagacaatgatatcaaggggatactaataaaacacacagacatcccccctcatgctgccaagactatataccattttgtttccattacatcaatttttttctccccttttgcaagcattaatcaaagaaacgtgaagagctcattaaagtgatagattgactgaaaatgtaaccactttttcattataaacagtttctttatgttcttggtgctatgggctttgtttttcagcatttgtcatgtagttcaaatgtccttttacatttaaaataccaaatgccaaatgggccccagttgtttggtttagtatgaattgatggccagcacagcagaaaccagaactccaaaatcacgagcaaagtataacatccatatcttaagcacacagaaaattaagtagctgtaaaagatgggtttgccaagtgatccaaggccttgccatgaaattcaggaaagcagaatcgcatcaacaactttcagccagctatctctgaatggttctagagacaagacgcctggcccaagatagcaccaaggttccaaacagttgatggttctttaaaagaaagaatctttttttcttaagtgttgaagtgtttcctgtacatacgtttatgctggcagatgaataggaaactgggatcttggatcttggggtcaggcattcccacatacatacacacacgaatcttcactagatgagggtttgatgctggtttgactctgagcatctctctgtacagcgtggtcaataacttttgaccactacctgaaataagccataccatttgtggtctagaacttgaacactgtggctagactgaatgagtttgggtcctgcctctttctgtttctaatttgtgatctggggcaatttatttaaattttgtgtctcagtttcctcatctgcaaattggaagaggaagatgtcatgaagattgaatgagttaataataataatacagggaaactgcttacaacagcacctggcacagagcatgtacttcatcagtactaacttactattatttatcaacaacagggttgtaagctgacagagaaaacaaaacacatgggttttagtcccaggtcaactcctacctctctgtgagaatgtagaaggattcaatgtcttatccaaactcagttctcccatccataaaatgaggttgtagcaatgtcccaaatccctttagattaccgtgcatcatacataatattgaaaccacgataattctgtgttcagctactcaatattcaggaatgtctgtggagtcattcatggggttgttcttttaaggaagtggaacacaggagccctctcttccagaatcctatcacattgtcggtatcaacaaacatatcaacatttcatacaagagatgcgcaccaaatacattaaaccacaacaaccatgtagcttgcacatcacaactccaggtacacatcatatcctctctcaggagtagcccctaaggcatgatcctccctccaggagccctgcatcctttccatttgctaacagtcaaatcattcatttgctgctatgcgatcacagtcgtggcaatggctgtggcccttggtgtcttcatctgtaaaataggaatgactctaaggccctctcagctttgagatttatgtctctttcatgaccccaaattttaaacgtgatctccaacaaaataagctagcaaagggaatccagaggatctccttacagactccttcacaagctctagtgtacatccagatttttttgattcagttttatacctttgcccagaggataaaacttcacttctcaaaccaaggagaaggaagtactttctccaaagttgctctaatggctgagaaggccataaataaccatttattaaacaaacactatgggctaaaggaagagaaaccaccgcaattaggcccctgaggcctgcaggcacagtacataacgatgggactctcataatccaggcaatatataaccagttgttccattttcttgaagttatcttcataatcaagatgctatctcgggcattgtgggctttaaaactatttttaattttaatttaaagagtaattaaagaaagacaatggatatgcaggataataaagtaagcgattagcagcatgcaaatgacataggcttaatgataatatggttctagtctccaaacagcttgtcgagagaaagccctttctacatgtggttgttcagctaatgtgtctcaacccacaattacaacattgctgacaccattaaccagtgaaacaacaccacttcgcgaaatccttgttgtctcattaaaaaggaaagggtcaggtaatttaccaacgttgtatgtctagttttgttgttggtaattagcaaacattacccagcatagactcccactgggaactggaggaactttgtgaaatattaaagaagaaagcctttatatttcactggaaaattgaaaagaggtgcagtaatattctccctgtcatctttttgcatttaggaaaaggaaaatgcaacttggaactctttaatttcaggagaaatattcaaaatgcattgggaagtcactacccacattaagaccctggatcaccattgtatactggcaaatagaatctgcatccctgtttacaaaagggagttggagatgggaggacgggaaaattgcaaactttatctttattgctcttacttatgttatttgaattaatctccttgaaacagaagaaaggagatataaaattttctttttgaaatgctacgggacttaaataagcaccagaattatttattcagaaaaatacacacacacacacacacacacgaacacgcgcgcgcacacacacacacacacacacgcacatacacacacatatttagacctaaagagagaagaaatatattccagggaagagacttcctgcctccatgcttcctaatagaatcttccccacattggaactcagaccccgcccccaacactggccaatgcttggtgtgttgtcagggagtagaatggtatcttattctttaaatggaacttttggaacataaaacacattccaataaatgtgagcagaaaattatgaattcattaaactactttggtatcttgtgctatatataatatttatattccgactactgtaaaatatgctttaatatctttaggcaactataaggacttaaatatttataaaatggctaaagataaagtatggccctcttattcctacatacagatgatgtaaggcatgcaatcaaagacaataacactctctgcccatttgtcatcttaaaggagccgatcaacgcgccatccctcgtgtgccatctacataagagttgttgccgacacaggcaactccagaggagtttgcgccttaaaaactacctagagtgctatacttcatagaaaacagggctttctgaaaatggagacaaaacaataaatttgcaggcaaaacagctccaagaggggcttcaaagtactgctgtatttatctctgggacatgagggaacaggaagcattttgatttaatatttcataagatagagacaattgcttccttgcatggtatatacttaatgctcacagaaatgagttttttttaaaaaagtttcaatatcttaaatgcaaataaataaataaataaggagacacacctgcataataggaagggcttcctttggaaatatggaatagacccatataatcccaataaagagaaagccaccacgaatttataatcacctaggggcctgttaaaagtagttttatagattaagtgtgaaacctcaaccctgatgttattattatttaccttccttgcttgcctttaggcccatggcctgattgattttcaaaattcttccatttcctatgctgattaggtattcaaagaattgtttgtgcccacctgccttgacctctcaaatggacaccccctggtttattttcccagctcccactagctccctgctgggaaccatgtggaagtttgtgaatttctcatgtatcttgcattttcacaatgcccattatatgctttccaaatctcctagcaatcatgcctaggagaatgatttattctataaataaatttccaagataaatttctatggaaatgtaagctttagtaaatcagctgcctgatacaaggatcagagatggtttccttgagtaagtaaggggctaggctggtgtttctcaacttgggctgcacgttggaatcaccaatgcatgcctgcatcaatgtctaatttaattgctctggagtatggcctgagcatttcaagaatgttaaaagttccccaggtgagtgcaatgtgcagctaaggttgaaaaacagtgggctagttcagaattaaatccacccatttaagggcaactaatctttgacaaggatgtcaagaacacacaataggtaaaggacagtctattcaatgaataatgatgttcagaaaacaatatttacatgcaaaagaataaatctgaacacttctcttacagcatatacaaaaatcaaatggattaaagacttgaatgtaaaatctgaaaccgtaaaactcctaggagaaaaaataggggaaaagctctttgacattggtctgggcgatgatttcttggatatgacaccaaaagcacaggcaacaaaagcaaaaattaaaaagcgggactacatcaaactaaaaatctgcacagcaaagaaaacaatcaacaaagtgagaagccaatctactgaacgggagaaaatattttaaaaccacctagccaataaagggttaatatcccatctatataaagaactcatatactcagtagcaagaaaataaataacctgattaagaaatgggcaaaggaacctaatagacatctttataaagaagatatacaaatggccaacaagtagatatgaaaaggtgctcaatatcactaatcatcagaaaaatgcaaatcacaataagatatcacctcatacctgttaagattgctattattgaaaagacaagtgataacaagtgttggtgaggttggagagaaaagtgaacccttgtacactgctggtgggaatgtaaattggtacagccctatagaagacagtatgaagtttctataaaaaattaaaaatagaaccaccacatgatttagcaatcccacttctgggtatatatccaacagaaatgaaatcagtatctcaaagagacatctgcacctccatgtttattggagcactattcacaatagccaagatatagaaaccactggtgtccattgacagatgagtagataaagaaaatatggtctgtgttgtgtatgtacctgcacatatatataatggaatattattcagccataaaaaagaaagaaattctgtcattcaacaacatagatgaactggagaacatcatgctaagtgaaataagccagttatagaaggacaaatactgtatgatctcacttatacatggaatctaaaaagttgaactcatagaagcagaaagtagaacagtggtggccagggactgtggtgagggtcagggggaatggggagatgttggtcaaaggatacaaacttgccattataggatgaataaattctggggctgtaatgtaaagtgtggtgactatagttgatagtgctgtgtagtacacttgaagtttgcaaaaagaatagatcttaagtgtcctcatgacacacacccgggcacacacacacacaatagtaactatgggagatgatggatgtgtttattaacttgattttggtaataatttcacaatgtatatgtatatcaaatcatcatgttgtaaaccttgaatatatacaacttttacttgtcagttgtatttcaataaacctggaggggaagaaaatcattagggtagacaaaactcttaaatttgtatataaatatttatgtgtctatgaagaggtaggaggagggtcacagagaagattcattattagctatttaaaggggtaggtacaagacccctttcccagttgagaactaatatgctataggttttctggctgagacccaaaattactgttttaagaaaaaaaaaaaaaagaggcaaaggagggaggccaagtgccatctgttgactaggtggagtagcatgggtcctgctctggaagggtgtcacttcaccaacatcagggctcctaccacaaccaaaccccagaggttggaagtgtatgaggttttctgtcagcgagctgtcccaatctctgcttcagagagcagctgcgttgcatggcgccatgctagcctgtctatggaggggaagcgccccatgctcactgttcatctgccctagtccttcctcaactcctctgtaggcttttgttagtctaccttacctggtctgctcaccttccaaaggtgtgttggtttctatcatcatctattttctatgcatatttacagacaaacagatcaacagtaattctggctgctaggtacaagtggataatcctaacttatgatttgttaatctgggagtaggaggggatgaaataaaatagtaaaattgtaataataataacaaaaatagctaacattgcttgatttctcccatcctaggtaggaagtgctttaacagccattcattcagggttgccatgtatggttgtgaaggttgggcactacacagtagctaatctaagtgggtaccactcatatcaataggcattgtatatttgcatatttatgacaatattttttcccagcagatgacagaaaagtgtattgttcaaacatattagtagattatcaccatttttttcagcagatgaaaataaggtgtcttgagaaaagagtgactttttctggcttacttaaaggtactgtatggacaatagaaagtcctgtatctcattgaattctcatagtcatttgataagccaggtgcatttagtattcttagtgagaaaattgagataaaaagaggtaaagtaattttcccaggcctagtaagtggcagatctgggcttcaaacccaagctgtcattccagacccatgtgtgccatgactgaacttgactgcaaagtgctatttctacagcctttgatgtttaataacctttctgcagccattatgtctttgtattcatacactgatccctcggtgttttggggtggggtcatttaatatatagatatatagatgaggaaatgaaatctggaatctttattatgtcaaattgctcatgatggacagaaccaggatttaaaagctgttccttaaccctccatgactgcatcattactctgacagccatgtttgtgattcactatcatgaactagagcaacaaaacacatcttccaagttcctcctgctccagtctaccgctgagaggaatgttcatttctacatggccagggaagctctcaggaagcattcacagctccctggagcagaaagcagagatattttctgccctttgttgaactttggaggtctcagtcctacagccttgggccctgggttggtactgtgtaatagtacattcagcgaggccagtcaaaggttgagggccaggagctattagtaaaggttaagggaatagtacagtttatattagagacaacctggccatctgataaaggctcctccagacaagtgcaacatctttgatctctgtaacccttgtccagtgcccagttgtcaaatgaagggagactaaatcctggagggaaagtgtaggtttttaatacaggtatttggctgctttatctcatttgagggcacgttaagagagaacaggctgcaaacaacagatagcaggattaaatcatgtattcatgtatccatcccctccacaaacctctactgagtgtctactaggtgtgaggtactgtgctaagcatttagaaagatttctggcagttggcgagcatgaagaggtcagcaaaacaatagaacaggctcttctttggaggatctactcaggttaacagtgcacccacctacaagcatttcctttgacatagtgagccctttaagtaccttggttataccattagtacacaaatagccaggtgaccctctgtgaaaaacactcggcctttcctgtttctgtgccttctgttactcagcttcagccctttccacatgcctgtcggaacctttatttatattaatcacacttattttcaaattctggtccctttactctggagtctttcctgactaccacagcccaaagccacctctgccttctcataacacattgtgtggcagcatgcatgggacactgaaaacatctggtagaacatctctcctggagatctgtaacaagatgctcaaggactatcctgcttttctggaattcagaaaataattttcctccagaccattccatgaagtataattgaagcatttaaggactagccatatccttaaatgttcaataaatccagaactaaagtcatttataaatcagttggcttctttgcagtgccactttttctttctttctttctttctttttctttttgcttgtttgtttttggttttgtttttgagatgggatctcactctgttacccaggctggagggcaatggcgcaatctcggctcactgcaacctccacctcctgggttcatgtgattctcctgcctcagcttctggagtagctgggtctacagatgtgagccaccacaccaggcttatttttgtactttaatagagatggggtttcaccatgttagccaggctggtctcaaactcccaacctcaggtgatccacctgcttcggccccccagtgtgctgggattacaggcatgagccactgcatctggcctcagggccatttatttctttatttttttcttgagatggaatttcgctcttgttgcttttaagaaaagaagtaaagtttttaagactgcacatgagctattgcctatagagaataggtgaagacaaaaatgcactgaatagctggctagatttatctgccagcttgaggcatgtgtgctatcttcacagcaggtgtattgaatgaaatggctcacactctgcacaaggaatacactgaaatgttccaagccctgtatccttaagtatgtgtgtcaaagtcattccatacaacttattttatgtttctgtcccttttgcctgtagaccccattacttctatgacagcatagactatggagacaacaggggcactaacctcatgcataggatgcaaaccaaactgacatgcaggataaggtagttgacctatccttatccagaatttcatgaggtgtcttagagggtccatgggattacaagacttcctttacttctctctgattctacagctgtggtttccccactataagacaatttctctggaccattttctgagcctaggctttgggcgctacagtggtctcttcattctcatctgctgtcacggaaacttccgcttgagcatggaaggagtaaataaaacctgaaaatgttatttaagtgtcttcacaaagaaagtaacagctaggtctcaaatattccactctcttccttacagctccgaagtcccatctatattcacaagaaaaacagaaaagaaagactccaacagtcatactgttcacagagacaggctaagcacagtgcttcacattgcccccagatttactcatttgtccagtggtagtagcaagaaagactgaagccaacagaatcctagtatctctcattgttggaacagctagggtcaaggggctcaaaaaatggggattcacagagacaagaaccgttgaaaacaaacttcagccccttaggtgcaaggaccagtttagaagtgaggctggcacaccttgagcactttcatccccttgagtgtttgtcctgggggtgcccccatgacccttgaaagtacatgtatagcttcaggcccattctcatcaggataacacttgccttttaagagacaggctgatgtgccgagaaaagcatagactttgaaatcagatgtttggagatcaactccatgtgcccttgactagctataaggctatgggaaaggtacctaattcccctgaatctctgctttctcaactgtaaaatgaaggtggtaactctccctcagcaggttgtcagggagattaaataagatattacataggaatgtgtctggtgtatggctcacctgaaaaaaaaattacattttcttaaaaaaggcattaaccaggcacacaaattttgaggagtaaactggcatgtgagagccagatgctaaaaccataagttcagtccaaccccaagaccacccaaaatctgctttctgtctctgaagctaagatttcccttcacgacagttgtcacaagccgggcacagcctgagtggggacatgaatctgctctgcatccatttggaaggaaaagatgattctgtctgtttttactttttcttctgcacatccactctccaagaaagtctttcatgcatggagggcataaaaccctccatgagttcaaaaagtagtccaagtttctcagtctcttattatagctgctgctgttgtttttccttgtttctcttgctaggaatacattactagaatagtaaatggcagggttaaagaggatctctcatgtgatgaaatatgctatataggaaaaattctcttaagttgaagtcatttagaaaacagctgcaattgctgctttgctgaaatacatctgcacctgagattcttgtgatgagattcatcttgggatgtccacggaagaaatgtaacagggcaggcccctttctgtacttgagatctgctcagagccctaagccagattttctttattgtttagtaagctcttttaatgaaatgtactactcttattatagaggactcaagataagatctaaatcacaaaccaataaaagaaaattattggggtagatatctaaagttactacctagaggctactccagtgtggtatttataaatctctaaacagttaagtataattgtctttctggtttttgggacggaagccaacagcagtttcagttacaatggaagaaaaatattttagcgctgagctttgttcgtttagtgggtataaagagaaatggcttctcccctatcaccatttcagaattgagagagaatattgtggtaatgaaatgttatatgggagcagctgaaaaaattcttctctgacttcaaggaggggaaatgtgtgtgaggatacatgtataggtgcgtctgcaagaaacagtgagcagcctgggggtcaggaaagccaggcttgtagaagtgggagaaggcagagccctgggaaaaaggcaggtgtggaagggtggtgtggaagttgaagatggggtggtctgtccaattaatggaaaagccagatctgcagctgctcaccccaatgccgtccgctccccatctttgaacacaaagacagtgccgttcaggaaggacatgaatgcttccactaaaagactcatgaccccaatcctgacaaacaccatagctctccctctggagttacaatgcaaatcatataaaacacagatccctatgtaataaaaatcaagaacatgctggatatccttagttataaaggaccacagaactcatctctctaccaatctccctcccatcacaaagagcgtgtcagtaactctcctttagcaaagagacagtcagggataggaggctcgctgcatttgcaggctgtccatgctgttctggaaatatcttccttatgttgggctaaaatcctgttctccttaattattaaccattggccctggtttttgtccaatggagcagaagattaaatggccctttaagcctgctggctttgttctcttaaccacttggcaagtgacatgttgtccaggcactgccccattctggccgtcctctttacaacatttttctgtttgtttgtcaaatttctgcttcaaatcttcacagctcttgacacattccctcctatcccaacaaagatgaaacagtcactgctcaaaagaaatgatgcttttatcaccaaggtttatctagcctgtctttactgatcatttgaaaattaacatgcagaggtcctcaatgcattctgtcctgtggatttcatcccagagttccactttaggaaggcccttttcgttctgctttttgtcatccagtaatttagagatcctaatccacactgtctcacacaaagataaaagagaaatcacattttcttctttggaacagtaaaagacatctcagactttaggatagggaaggtgtaccctatgcccccaattaatgctatctctccaaggactgctgccatacttccaaagaaaaatgtcattccctacttgaggctcttaacctttgttgaaatgtggagaaaggagggtgtccgcttatatgtggatgttcatttagtgtaactatagcttcaggtcaaagagggcgggaggaaagctgtgtgtgtgtgtgcgtatgtgtgtgtgtgtttgtgtgtgtgtgtgtgtctgtgtgtctataaagcataaaatatggaaaaaaggcagtggacatatgtcttgggtttgagatcttggctcctccctcccctgggacattcgggacaggctcagcttttggttctccggcttctaccaaagttttcctctaccctctctttctgagatggtatacttctgtcctgcaattctcttgcctctctccctctctctgaggctctcctttgctcctagagcatgagcaatgggccagattgctagaagcaaacttttcctggattaaggacttcatttccacccttcagcttttcatgcccatctggattttccactaagtccccgtggaaataaaccatgactaaaacccaatcctcccaacactgctttctcctgcagcctgtccctccactctgccatcctctgacccccagaaggaaacacacatccatgcagactgttttgcatgtacagtgactccttctagaacctcccattctttttccagtccaaggtttcaggcttccatctggatagccacagttcctaaccagagtccttgcatcttcttcctttccactccaaacaatgcttcacagggctgccagatccatctccctaaagctcaggtccaatcccatcactctcttgctttgaaaccttctgtagctccccagtgcctagtgaattatttacagcttcctaactcataaacacataaaaaattatttacagcttcctaactcaagaaagaaaagaaattcctcaatgcccaacccacatttcaacttcatctctccctgctgccttatatgtaccctgtattggggccaaattgtacttgtccctgtccctctaacacatccccaggaatctttgccgtcacttccattcgctccgtctcaagccagctcactttgcctccacctgttatctttttcaagcatggaattaattactcttttcctataaatctttgatgactcccccaaatccaaacccttagcaagacaagtctacactctaggactgcaccatccaatatggtagccactggctatggatcactttaaatttttatatttgttaaaattaaattaaaaggaaaaatttaattcctaaatttcaagtgctccatagccacatgcattcaagtcatccacagatgccacctcttcttttttttttttttttttttttttttttgagatggagtcttgctctgtcgcccaggctggagtgcagtggcatgattttggctcaatgcaagctccgcctcctgggttcaaatgattctcctgccttagcctcccaagtagctgggactacaggggcgtgccaccaggccttgctaattttttgtatttttagtacagacggggtttcactgtgttagccaggatggtctcgatctcctgaccttgtgatccacctgccttggcctcccagagtgctgggattacaggcgtaagccaccgtgcctggccgatgccacctcttcttgaaagccttctcaattcctcaaaatacctaaaccaaggatccctttgtgttcctctatttctagcctcgtccttgtttccttggactgtcattgtttatggggatacctcctccactcacctgaatcctgcaagcatagtgagtggctgaatccaagcaacctttggtcacctttgtgttctgggcctttagagtgcctgatgcatggagaacagccatttattcctttttcttttccttaggagttacctttcatggaagggtaagcaggaagcaactacaagatcatcatttcaaaacaatatgaaagcagaatgggaaatgccatggcatgctccctcttttcaggtatgaactgaagcagctcagagagcggacattgcctccctctgctcaccctttcttccaagatcagactcagttctcatctttttgaaccacagggaaacagtctggcaagagccactgttgtaccagctgatttaaattgaaatgttttccccagataaatgcgtgctaaataatacaccagctctccagccaaagggaagtgacaggcactctgtaaataaaggcacttagttgctggtaaagagctgtaaagtggttctgagctgatgtttgctgaccagcaagaagcagcttcatctgctttatataattgtcactgcagttttgcctgctgtatattaaaactgcatctcatagacccaactgtcacatcggatataccatctggcttgggatatgccaccttttctgtaattgtttttgacaacaagccatcacatcttgggtcttttcagaaagtgtctggtccagaatccctaggctgggtcagttctgacaccatgtgggctagaaaagtgacatcaaaagggagtgtgaaaagagaacagaagagaaaaaagaggctttgttagtctaggagccctaataacatgcagtggcagctgtccaatgaaggctctactttctcaatgtgaatgcacatttttcatgctaaattatatcatcttaggacagctttccatagggttgcatgcatattctggcccaagagcatgacatttgtcctgagtccacatttctacccagtgaggttctagagacatggagacagttcttcagacaatgcagagcatgaggttccataaaggaccatagaatacataagagggaaagcaaggtgtcagtggccagaaatctgtgtagttatcactcagaggaagttagatttgttttccaaaatgataagagtaacatgaaatccccagcactttgggaggccaaggtgagtggatcacctgaggccaggagtttgagaccagcctggccaacatagtgaaactctgtctctactaaaaatacaaaaattagccgggtgtggcagcacgcacctgtaatcccagctacttgggaggctgaggcaggagaatcacttgaacccaggaggtggaggttgcagtgagctgatatcacaccattgcattccagcctgggcaacagagagagactctacctcgaaagaaagaaagaaagaaagagagaaagagagaaagaaaggaaggaaggaaggaaggaagaaagaaagaaagaaagaaagaaagaaagaaagagaaagaaagaaagaaaaagaaagaaagaaagagaaagaaagaaagaagggagggagggagggagggaagggaagggaagggaagggaagggaagggaagggagggaagggaaggaaggaaggaaggaagggagggagggagggaaggagggaaagaaaagaaaagaaaaaaaatggagagtaacatgaaatcctttttgttccccataatccctattcccttggagcttgatcatgccaaatgcccagatgaaggatgacaaaagtatctcaggccagtgggcactccagttagtcaaaagggtctcagatatagaaaagcagggaaactcagctcacagagtcagctcacaggctgggaggagcccaaggagtggagtgctgggtctgcagccagaggtgagctctggggaaggagcgatttctctgtgttgatggctcccactggaccactgcctttacaaggttagagtatcaccagagaacagtattcaaaaacaagagaggagcagacagacagacaagaaaacaatgggacataaagtcttggtgggcctagagctttgacactctctcttagggagcagaacagactgctggctagtgagagacagatgctcctctccactgctgaccaggggtctacgagaatcactgctgagcatagaaacacatcctttgccttcttctgtcatttgtgcggtcttagtccatttgggctcctgtaacaaacaccataatctgggtggctgatagacaacagatatttatttcccacagttctggagaacggaaagttcaaggtcaaggcgctggcatgttcagtctctggtgaggactttctcgcagtgtcctcacatgacagaagggacgaggggtctctctcaggcttcttttactttatttatttgtttgttggtttattttattttgttttagacagagtcttgctctgtcacccaggctggaatgcaatggtgccatctcggctcactgtaacctccacctcccgggttcaagtgattctcctgcctcagcctcccgagtagctgggattataggcacccgccaccatgcctggctaacttttttgtatttttagtagagattgggtttcgccatgttggccaagtggtctcaaactcctgacctcaggtgatccacccgccttagcctcccaaggcgtgagccaccatgcctggcctcaggcttcttttataaggacaccagtcccattcatgagggctccaccctcatgacctaaacacctctcaaaggccccaccacctaataccatcgccttgagggttaggatttcaatgtatgtatttggcagggagtaggtggagggtacaaaaacattcagaccataactgtgtgcatgtgtgtatacaaaagaaagagtgccctttttttctttggaggaaaaataagctccctttctctttcctccatatctcctgtcaaaacctatttttcttgcttatcctgtgctataaaagaataaagaaggcttttgggcaccggggagtggaagaattgttaccagtttggcctttatataggatctaagaggctgggatgaggtttaagagaactggaaggaacaactatatcagatgtgtatgtaactaaattatacactgacattctaatctgtggccctggaaaatcatgatcgagtttggaggaaacaggcatgttggggaaagggagtgttttcctgcctcctcctgctggcttctgtctgtacttaaagggagaatcattgctttcactgttttcctttccccttgatggttcactcctccccaggagaggaggagcatctaccaagggttggtcacatcctgttcatgtgaaggtttactgtgctttaaaagggcacatttgagttgcctggggatcttgttggaatgcagattctgacccagcaggtctgggatggcccatgaggttctgtaactctaacagcctcccccaacagacacccatactggggcagggcagagaggacacatattgaaagtcaagggcttaaaggcaggaaccaaatgccggcttgcctctttcaactcctagaaggtcagcttactgtcttctcacatcctttctcgcctgtgctacccgggcaggccgcacaggatgcgggctctacctcttcaggatgcagctgggagtaagctcagagcctctcctaggccttcacatgttgtgctgtcctgcgggcacagctgagcaggtggataccaagatttagatttgggtgtggcagggaggacggtggcatggagaggtcaaaattaggcttcaggctgtatcagggtgatgtcagaaggacagaagccatttcacatgcaccaccaaaggggaaggttctcttaagcttgaccagaagctgctgtgaatctcaagatcctcagagaagccccagcccctctctcagtctgtagcagtgaagacactggctcccagaaagctcatctgatagaagatttgaacctgggtctgccagggtctggctgcagttgcctccaaagaatcaaagcctatctttctcctccactttccaaatctcaccccagtgcccatctcccaccagctgactctagcccagagccatgcagggaagaggattccaggaactattgttcctggcttttctgcaatgctaagcaaatgttagaaggcagtggtggtgatgtcaagttgacaaaaaataatgtagctcacaggtccaggatgcatgattcagctgagcttctagaaagcctggcatgatggggaggaggtcagacacttgccaagctatcaataaggtgatgcttcatatcccagtagccatagctctcatgggctgtgctcctacacccttccatcctggactgatgggattctggtccccatcaggcagccaatgccaccctctggcagctcgtctgtaacaactatcctccaattcatggctagcctacacggaggtgtcactcaatggaaaatgctttgcatcctatcctgccagatcctgattacagaggtcattttttatgaaggttttgctgtgttgcctttctgagacccctagacatctttacttgtaaccacctgcccagggtcccaaagcaaatgacaggaaagactaggggcagagtaggaaggcagacgtgtgtcacttaaggctgctttgcctcctataggaaaatgtgtggtctgacaagtgtcaccatttgctaaatgacttttagtgtccatagagttgccactctccagagattaccatcccttggtcagcagagtcctagaggcggctctaacaatagcaaagcttcattcccatcccagctcaatggcaaaaacatatactggaaggaaacggtcagaattgtgcagccagcttcttttcagtgctctgacatttagctgatgacactggtcatgaagccactccttgggaaagctgagggggtggctatttaaaggcttgtttatcctctggaaaggcaacctagtctgtgtgtgggtgaccaggtctcaagcctgcattctggaatggaaagaagaggcagcagatgcccctttgaaagccatcatggtgaccgcaggtttcactgccaggcaggctgatgtgagcctctttgaattactgagtgaaggatatccctcttgccagcccctgtcccctgcaggcacagcaaagaagtattacaggctgtccttaccttgggaattagcctgcaagactccgatgctgtcatcaaactgcatagatttgatgttgagtgacgccaagatgcattccttgtcctgcagcgaagtatcatcaatattattctgattggctgacaggataacgcacatgtcacagaggttgatgttgacagcccttaaatcagcccgacttaatggcgtaccctttggcatagaggaaagaaaaaaaaacagagatggggggagaaagagacagagagagagagagaggagcaaaagtgagaggagagggaaagaggaaaacaaattaaagattgagtcggagctttgggaaattatttaacaagtatcttttttatgccttgacattaagctggcctaactacattcaagggaataggagctgtgtgctaatctaaagggtagtcggtgctgatggcagcattttaagcttgttctcaatactcaatcaagctattactaacaaacgcgggagaggaataatgccagggttctacatcttcttcctgcctggaaattgtcttgatttaagtaactgtcctgtggcaacctctggctttcagaatgtaacaagggggtgggtttcaaatgcctgtttatttaatagcgggtcacttctgtctcaggcaaaagacagcagttccaatgcagccaaggagaaatggccagtgagcacagagtgatgaggtgggcctggatgtgcggctcaatttggaggctatggatggagtggaattaatgtgtgcaatgcaaaagagatatggaaaggagttaagcttcagatcatataattttattgcatattttcagcaagaaaaaaatacacagggaaatgacctaattgtccaacaacataggaatggagaaatatacttttggacatgcacacagtgaaaatgtatgcaggaggtaaagaggcagagctggctctccatgcaggcattggtttagaagcctaagatagagggggaagtgaaaaaaaaagttctacagcagttaaaaaaaagtatagtttcatttatgtaaaaaaaaaaacccacaaaataaaattacatatatataaatgtatgtaaatttggaaggaaagcacaggaaaaatagccattacactaataatggtaattccctctgggaagggaaataggattcgtgggggtgaggggaaagtttgcttttcactttatatacttctatattgcttgaatattttataacaagaacatatttgtatattacaggtacatttaaaaaataaataagccagtaaacagattttttaacataaaaaataacaacaaaagacagtggaaaaatcccagatccaggaagtaacaacagagtccgggaatgcaagcatagggaaaatagaagggttaggttaggacagggccatggcctccacatgctctgtgtcttcaggtgaagccacagcaaaatcatcaggccaccccatgccatagctccccagtggccacgcggcatcattttggggctcctgtctggccaccagcttcattggtcctctagcttgaatctagcttcctctttgcctgtgtggtgacctgagttaccttcaactcactgattgtgtagaccaagggtttgccaactgtcacatatctgggaatgtcctcctctaatctccctttctggagaactggctttggaaagagacttggctgcagagatggagcctatctaccctcttttatgagtcactggtagtcatgattctattctcaggccctaaaatattgtgcaactatggaggaaggggcatttagcactgtggttgctgctgagacacaactagttccaagctctggagcagcgtctttttgagagaaggagaatgccctcttctcctgtgatctcttggtacaaaacaagtccaaccaacttcctgaatcattttgccagtgcataagcttcaattgcctgcatccatattcttttaattttcatcttgtagggaagccagccgtaattgtgatataagatgatccctgtgcagttgtacacacgtgatttcaaactacaagaaatacaaatgacatacatagaaatcgcttatgtttctctgggctggccctataggcagggtactgtttaaccaataaactctgtgaagacataggtgaaggcccattttgtgaaaatctattgtgcttgagtatgttaaattttggagggtttgaaatgacctgcaaagatgacagctcattcatatacatgaagaaagatgagtgaacgtgtacaagggcacacagagccgggcgcggtggctgatgcctgtaatcccagcactttgggaggccgaggtgggtggatcacctgaggtcaggagtttgcaaccatcctggccaacatggtgaaaccctgtctctactgaaaatacaaaaaaagtagccaggcatggtggtgcatgcctgtaaacccagctactcaggagactgaggcaggagaatcgcttgaacccaggaggtgaaggttgcagtgagccgagatcgtgccattgcactccagcctgggcagcaagagtgaaacttggactcaaaacaaacaaacaaacaaaaacaaacaaacaaaaaaggtcacacaggaggaaacatacacaaacacacaaaacacacacacaaataccaaatatcacacatatacccatctctctccacacacatacacacacagactcatgtatcctggtaaaataataaaccctttacaaagacactttcagaggtcaggggactatgtggaggagcacatgacagaaagataaccatggaatcatataatcaaatcgaccatatttctggaatgagcaaagcatatatatgcttatgctctcctctgtgtatgactgtttgtctataggtgactattttcaactgcctgtgctcactaaggcagtgggtttttggcccagcatccaaaagataactgtccgatctttttctcactcctttaaatatttattgagtccctattgtgtcaggcattatgtaaaggcacatggtggcatctaatgagtaacatgtactgcttgtggatagattcttgtgtgttctttaatgaattatattacttggctctttttccccccatttctgaggttttggaagctgataacagaaataatacattttagctttgtaagtgggggaaaacccagacttcttaacatgtagagaaatccatgttcctcagttgtttcttgttttgtttttgtttttgtttgaggcaggctcttgttctgttgcccaggctggagtgcagtggtgctttcacagcccactgcagcctccacctctcaggctcaagtgatcctcccaactcagcctctcaagtagctggaactacaagcacacgccaccacatcaggctaatttttttaactttttgtagagaagaggtctcaccatgttgcccaggctgctcatgaactcctgagcttaagtggtcctcccgcctcagcatcccaaaatgcagggattacagggattagccactgcacctggcccctgtttctcagtttcagggatgtgaacttacaagaaaaatatttggaggataagtgagatttgcatgaatttgtgatgtggagaattacatcaaatgttgaaatgcataattctctacaatgttttgagagtttgtggactatgcattcattatgattaggaagtagttaattacatgactcctaaatcccatatcctcacactaaattgtggagtcccagactgttttttcagactgaagtcctaatgttttgcagtcaagaatatcatgcacacatgcacacacggacacacacacaaacacaaccatgaacacgttgctggacttctaaatgaacaggggttggggctgagctgcagaaggagttggccttctgtacagcagaaataaagaactctgttatttgcatttatttagttaaaaacagaaggtggcacagatcaatgtttcttcaagcattaaaaatgccataagtataatgctataaatagttctgtaagcaaatccttactataaacatcataatataacaatgctctaggttttgtataggcaggagtgagagtgtttagacgctgatatggttaatatacttgatacaagctaaacttcatccctgatgagggactgaacttggctgcaaattccttttaataaggtctcccagggtttggattttccttgacagagcataggggaagtgctgagtcctcaggcccatacccagatgaagaagcacaggcatgatcaaagctacaactattatatccatccgggattttcttttgtgaatgaaaagaagaaaaggcatcaataatgtgaccttggacttacaggcaatatggacactttggggaagttatgaagcgtctcccattcccgcttgaggtactcaatagagcccacaaacacaatgtgcttgagctcatggtaatgaaagttgctggcacggagcggcatcaccaggttccggaggccgatcagggctgagctgacgtcgccaaagatgcagaccacgacatggccactcaggacggtcatggcagcttcacttcgagtctacaacagggagaagtgggtaagagtcagagagaagactgcatagggctgttgtaaggagtgaaataaatcatttgtgcaaagaatcaagcaaatatttgctgagagcttactatgtgctattatttttatttcatcaatgttatatacatgccatatagagctataatttgagcacgtgtatatgtattatatttttgtaataaatctgtccaaatgtatagccatacacattgctaccttctttgacaaaagatttaagaaaggtatgccataaatatgtgtgagcagaccttcataataattttcaggaggtaaaataaaaaggaaaaggaatatttatgctatttggaaagagaagtcttagtttccatgaaattgttgattaaatgagctgccttttctggcttgcttgctgagatgatgataaaatggtcagatgcctgcactgggctcagtgggagaaatttgactttagaattctagacttatcagtgagatgtccgtgcatcagcaggtggaacatgctacctaaagccaggagtggaaaactacgacccacaggccaaatctggcccactacattcttttgtatgttcagtgagctaaaaattgtttttgtgcttcaaaatggttgaaaaaaaatcaaaagaagacaatgtcataatctgtgaaaattacataaagttcaaattcccataaagttgtattggaatgcagccatgctcatacgtttaggtattgcctatgggtgcttttatgctacaacagcagagctaatcagtagcaacagagatcttataccctgaaaaacctaaatttttcattatatgacttattacagaaaaagtttgctgacccctgtccaatgctgccttggactttccagggacatttctggaggggcctgttttgcttaaatcattcagagaaaagatctccccaaataatcattacaaggggctagagagagattagtaagagcaacaggccagtgtcttcctccaactccaaacctctatctacaaaggagacaaatgaaagaacacagtcactctattagaggagaaccccaacttcccaggaaatacaaatgtttagtcactgctggccctttgattcactgagctagtgaagccaggaggccagccgtggacctttctctgcctctccttctggttcaatgcctcccattcctgtccacccactgcatgcctggatggccccatgtggcttacaatgctttgggggaggcatattaatgtccactgtacatatcaaactctgcttgatttaatctctagaattgaccactgcattgattgtataaatgccaatgttgcaattcacaacaatgtcagggttattacagtaacccccaaggagaggaagaaactagctttcactctctgatcattagaataaagcaggggctgtcaccattattggtttccctctgcaatagtccagggaaaccggagacataagctgtaagaaatgccttagaaactgtgaccaaggaagacccactggggagctcacatcacatatccccacttcctgcagaagacctggagttagttatctgggccgcacggaagtgcaagtgcctgggtgccaccaggagacagccaaccagtctataaagcactgttatgtgatggggctcctaattatttgtaattggccaggtcacctgggaggctagctcccttcaacaagccagaggaatataaactgggcccagggtggaagtgaattctagaatagggaggtggggaaggcacagttagttgagtggccgaggcacagatgctgaccccaggaacttcgatctgggatcaaaacacccatcctcagactggccacagctacatcacccagagaaccttatgaatatcctaattctagagcctcagccccggtgtgtctgattttgccgggtttaaagcacactagagagagaaactgatcatttctctatgtatctggaattcccatgcatccttccaggcccaacccaagcacaacctatgtgtgtatgacgggacttgcctggtcacttaaacacaccctagtccttctcccctacatttcaatagcattttgcacctcttaccacttagctttaaatacactgtttcatgggttacattttatatcttctctctaattaatccaggaaattacaattgggactatctcttatatcttcaaatccccaaagtagttagtttcccgtgcccagtgggtacacaacctcaaagcatcctcatgtagctggccctacctgtcattcttatctctagccgtgttactttagagagggcttcttggatcatactttccagacagcacctcccagtctctttctagcctacaatgctgctttacttttttcaaagcatcctataaatatctgaaatgttattaagtactcatttgtctacctagagataactcctcttcccccagccccaccctgctagaacacaaagagataactcctcttcccccagccccaccctgctagaacacaagctctgtgagagcagtcgttgtcagggattgcatctccagtaactagaatggtgtgtggcacatagtaggcctcctggagatgttttgttaaatgatgttatttttcataggatagaagtagtaactcacctccttaaacttttttatgctggcaggagatgttgattgaatatcagttggcatgcatactacaccaatatccaggcaagtcattaaaaccctaggtcccagatacggcatccagcctgtgacctgccacaagtggtaacatcaggctaaatttaggccaccagggcaaaagtgccatgaatacatcagaatgtacatatatggctgggtgcagtgactcacgcctgtaatcccagcactttgggaggccaaggttggcggatcatgagctcaagaaatcgagaccatcctggccaatatggtgaaaccctgtctctactaaaaatacaaaaaaataactgggtatggtggcgcgaacctatagtcccagctactcgggaggctgaggcaggagaatcgcttgaatctgggaggcagatgtttcagtgagctgatagggctctgcactccagcctggcgacagagcgagactctgtctcaaaaaaacaaaacaaaacaaaaagaatgtacatacgtgaagcagctttgcgagtagaacaatttgcactcctggtcagttggacaacagctgtttgctaagaattctgactttctgtgctcttgcctgcaactttcccacctctgagacagcctccagcttgatactgtattggctgttaatgctcatttataattaagctgagaacacacatacacatagataaagcataggggaaagtccagtgtgttagcatacaaagccattccgaggacccagaacagtccttgtttaggaagggtggtcctgacatcagaaatgataggattttcctggctgacaaaaaggaacagacccataccaatctggggattagaggcccaagggagaaagaacccttccatctgactttcctgattattaatccatttctcatggattagcaagacaataaactgtaggaaagccagtgtaggcattaagacccaaagctgttaatagaacaagggcagagagtagaatggattgttacctatgctgacattcctgggagagactgggtgagcccactgctgctatgaagatgttcacaagccttccacgaaatagggctctgagccccagcctccccaaggggactgtagttcattattgtcatcattatgtcatgcatcatcatgcatttccctgtctacaacatgcactaagaaagctcacagatgcacaaggctattatctataagaatacaaaacattgctataaaccaataacaatacaggcagcattcagctttcctcacagcatttaataatagtaagaataagaggtaactttactgagtcatctgttggattttaatcttcactacagccctatgagttagggtcattctcatctcatctttttacagataagaaaaccgaagtgcaaaaagtcaaatgaattacccaagccatgcagctaataattggtacaggcaggctctgacaccagcgccatggccacaggaattatgttcataccacctcccaccatggctttcccacagcaagtgctcacctactcttatgaggagccaatatattcagagattgaaaaatctgaatattgcttatgttctgatcagaggtctagctgcttcaatctatgctcagaatttcactcatcaaaaataattaggaccagggacagtattatcccactgtccaactagggaaaccccattcctagcaaatgtggtttggggcagaagcgggcaacatcagatgcacagtccctcactcaccaggatgactttctctatctccttgggtgcacaccagtgaaacatcccagtagagtcgtacttcttcacattggagtccatgttgtcaatctgatcattgccaggaattaacaaggggtcatgcctgggaagaaaaggacaggaaaacctaagtggaaaatgtgataaattataaatggaaagtgccccctgaattacatctcagaggatgtgaaagatgcagaggaagtggttgtcactgaaggccattcttctgcttacagaatccatcctttgagagacaactgccccaaaccaccaccccacttctggaagtgcaggtgacctttgtcagggagcatttctgcctttcccccgctcctcttttcctaaatggtcttcctaacattttgtggattcagcctccctttttaaggctacctcactcctcttcctctcattttaccagctattcgatctccccagcgtgcacacacacacacacacacacacatacacacacacagacagacacaccaaagggttgctatgagcctcggcaatgaagaggaaggaataggaatagagcctcatgctgactgactggcatgaggatggaaagccaattactcgctccttctgactacaacttctgacgtgatgctcttcgcagtaaaagctttaacaggctgcactttaaatattttagcaatttgcccaatcagattttgctctccctggctgaagcctttaaagattcagcagcatgtcacttcagagcagactgactaccaaatgcccacatctggaatacatgatttcaatactaaacaacaccctctctccttgccttgacaactgtatatgcactaaccatccaatgatgctccccaccaccttcacctcccaactgctgcatatcttagatgagagcctcaagctcagatgcatcttaataaacttgtttcaaattctcagggcaacattcgccctctattgccttgtctattggtggaaaaggaagatgcttccataaaggcctcccgtctagtgggttggcagagcctcactgacaaccttaagaactgcaatggaatcaggcagttctaacaagcttatagcacaataaataagctcctgcaccttgaatcatagtcaatgtccatgcttttatctctgatagtgattcagcacctcgggtttgggaagtcattgttccttcctgcaaaactggccatataattaggacattgtcccagctatacttaaccactcttgaaatggagctatcttttctgagtaatattgtcaacacaagacagaaaatatacatcgggtcacattccataaattgtaaagtgattttaccttttgaaattctatatttcaacatcagagggtgacttttttcttttttctttttttttttttttagacagagtctcgctctgcagaggctgacttttatttactttttactatttgtccttctgaaatgtctccgatacttcccacttatatgtcaagagtacagagtgggacagcaatctcttccatggcccaaaaacctaggattaagcttttgaataactaccacgaccctccaatatgctccccactcccacataaggtgagaaaactttctcactgcctttatttatgcctgagaatttgcttttagactacaccaaatgacaaatactatgtgaagccaacttgcaaagttatcttcaacgaacatgctagactactataggaatatctgtcatatctgatcttaaaagaagaacaatcccactccgagtagcatctcagtgtctggattgttgagaggtcttgaggtatgtaaaccaccaggccatcttccaaatactgaacttagtcaaagatgttaagataaaaaggctgataagaactatttacagatcagggtgagagcacattttgagggatgtttttgtccttgaagagtctttaacagttgcatagatatctattaatattatctggaataggtaggtagacaaaagccatcatggagaagaggtttgagaaaatgaacaaaattaactctttccagcccatgaagaacatatttcagttgcaagaggatattagcagacttgccctgaagatatagagccaggttcaaattctcttgccctgtttactggttggagagaaagtattacctcaggatgacctgagacctgcccctagtgcatttaggatttaaaagatactcagaactatgttcccataatatcagcaagcaagcaaatgaaacagcaagctgacaaaaaacacttttagaaaatgtgtgccttggggaagaggagatacattttggtttggtatacttgattctttctgggaaggagtcagacgttgttaacagtggcctacaactttcatccagaaaagcaaataagcaagcctgatgatcgatcgcccttcaataaaaagaaaaaagacagctaatgtcaagcttcattaactggggtagtggtttccagaaaccaggcataatttcacactggagctcaagccatggtttgcaatggaacatccagaggcatccaggaagtcttagaggtatgccacactacactctactccccacacatctctcatcctggcctggaccatttaaatataaacaatccaggatttcccccaagagactgacctgaggaacatcaaaaacctcccggaacaaagacattaccctctctgaccagcatggtacctggaattctaactttggtttattgaatcagtaaagcaaccaattgaatcagtaaagcaatcaataagaatcccctattctgagcatggaatggaggctacagtaatgattaagataaagtccctagtcaaagagaggtccacaagatagcaggaaaaaaatatatatacaccaatagttcaatagttacagtaccttgtggcaagtgttacagcaaagtacaaggtgatacaagaataccaagaaaaaagctgttcatatcctggtatttgggtagcattaaggaaggttttgcaaagaaagtagcatttgggccgggcgtggtggctcaggcctgtaatcccagcactttgggaggccaaggtgggcggatcatgaggtcaggagatcgtgtccatcctggctaacacggtgaaaccccatctctattaaaaatacaaaaaaattagccaggcatggtggtgggtgcctgtagtcccagctactctactcgggaggctgaggcaggagaatggggtgaacccaggaggtggagcttgcagtgagccgagatcacgccactacattccagcctgggcaacagagcgagactctgtctcaaaaaaaaaaaaaaaaaaaaaaaaattagcatttgatctgaaccatgagaaatgaagaggaatctcagcatgttgcagtgttgatccactaatagccagtaggacccacccagagaattgaggcccaaatgaaaagggccaaataatggcacctaaaaccatggctgaagatgccccataccataccacctaacctaaggtacagaagactcagaccaggccttccagctgtctccagatgtgcaatgacagtcaagttgaagatggattaaactgattgagtatgactgattgacagcagactaagaatgatccatgagattaagagagaacaaaaatcatggttccaaaacaggaagattgttataaaaattgaaagtaattcaaaaatgaaatgagttgttgcccaagacagtgggttttctatcattgagccattccacaagagcaagggatacagtgagcatatgcatataaaggttgggcgagcctagaagatcctgaaggtttgaagcactgtgctgtcactggagaaagacacagctagaagaattttgaaagtactggaccattgttggatatcagaaggctggagagccctgagtaggtaaagaaaggttgctagagtgaagatgagaggtaagcagcgtgggagagggattaatttatggctccagtaagggccagcactgttacacactcactggatttcacagtctgggagtaagctgggaacacaattcgttccagcaacaatagagtctgtaactgtttctggccagacagtataaatttctttactatggctgttgctgtagtaatttcaagtgccttaggctggcctgtgctgcagagagatctctggaacaggtggagagtgtacagtcagttgtccacagggactaaatcaaagtttctaaagcttctattgctagaagaaagtccaagcatttgccattgagcacaccaatcaacactgctgtgatccagggagacccagaggaattgggccgtttgttgtatggaaaggaggatcatgagaaatctccctgaacaagggatcccaacatcttcagtttgcaaggtgatagagacccacttccaaagcctctcccacaactcctcaaagaccagttagttgaaatcaaggaccaggattagatattgtctttcacatcataatgacattacctaagtcttccactcacaaagtaattttcaatttccctaaaaggcaccataattaattcaaggctcacttgtcacttgcgacttagccaatgtacatgccctattttagggtaatagaaactctatgatgtgagatatatctgctgtttcatttttatgggctgaactgtgttctcccccaaatttttatgtgaagtcttaaccgccggtacctcagaatgtgactgtattttgaaatatggtctttaaagaagtaattaagttaaaattaggtcattggggtgagttctgatccaataggactggtgtccttacaagaagaggaaatttgggccaacttttccacaggagggaaaatcatgtgaagacagagggaaaagacagagatctgcaagccaagaagagaggcctgaaacagatccttccctcagtacccttgggaggaaccaaccctcccagactttcatctcagacttctagccaccagaactgtgagaagctctgttgtttaagacactgggtctgtgatacttgattacagcattcctagaaaattaacacaatagcccaccttgaagaaaaacaggcacaatatatcagatatcccttagctgaaggcccccggctgcccttcttgaatcttaagtttttcttgtccatttaagggggggaaaaaagcatcccgccattatttcaggaatacatagacatatatatgtaatacccagtatctcctctaaaggttttcggccaatatccttcccctctccaaccaccttctctaccccaccaccaacatacaggcatgttagatctgctctgccagagtggtaacttctctccgtctttaacttagacatgcatttgaggatcaatgccaatgaaagcccagcttaaagcaaagaggaagcctgaacactagccagctaatttgagcagtctgacttatagagtccatctccaaatggagtgttcaggggttgataccactaagggcaggaaaccacctatttccttagtgacagtataccatagtggttaagcgccctggctccagagccaaaatgtctgtcttcaaggcttggctcacctattacttgctaagttgtacattgccttagtttcttcatctgtaaaatgggaatgttaatcattagcattattcaatggattccatttgaggattacatgagtaaagatatttcatgccctgaatacagcatctgacctagagcatgtcctcaagaagtgttaactagtcttatggttatcatcctttatactttgcttaggacccactcatgtattactagctctgattatggtgaaaggaggcaggaaagggagagcagttcaataataaagatatagagctactgctattatttctactactgctactattaatactactactattgctgctactagtgctattaccattgttgttactatgatgaatagctgccatgagtccaacacttccaaatgttggtgcactaaaacttttacctacattttatgatttgctactcacaagaacacctgtaggtaatttctgttattatcgggctctgtgtatacatgggaaacaaaatagataagtaacatgctcaggtggcacagccagtgagaggagaggcaaagccttaacaaaaaggtctacttggctgaaggccagtgctgcagggtgcccacctcataccctcccactttaaggaggcagccatatcttgttcattctccatcaaaacaccccaagttgcagtgttctaagcagccaagaaagggaaaccagcatcgcaggcatttacaaaatgcaccacttatgtgaatgattagcagaaattcaccccataacccttgcatctcagctcaccctccagtgtccacagctagaaattcagtgtgcctaaagtctaataaggaacacaggcatggccaagtatggtggctcatgcctgtaatctcagcattttggagggctgaggtgggcagatcacctgagctcaggagtttgagaccggcctaggcaacatggtaaaaccccatctctacaaaaaatataaaaattagccaggcagatggtgcacgcctgcagtcccaggtactcaggaggctgaggcacgagaattacttgaacccaggaggttgaggctgccagtgagccgagatcacactactgcactccagcccagcaacagggccagaccctgtctaaaaaaaaaagaagaagaacataggcatacctcatgttattcaactttgctgtattgcactttgcagatattatggttttgttttttttttttttttttttttttttttacaaattgaaggtttatttttccattgctagagcacaggcagagtagatttcacataattcttaatgcctatgggattttcagaatgttaaatgagctttgacttcaacttaaagtcaccagctgcattagttccaacaagaatcagcctgtcctttgaagctttgaagtcaggcatttacatctgtttacagcatgatctactgaatattttaatcctgctgttgagacctactgctcagagaaaaagatttctttcaagatgttactgctcactgataacgcacccaattattcaagagctctgatggagatgtataagatgaatgttgtttccatacctgctagaacaactaccattctgtagcccatggatcaaggggtaattttgactttcaagacttattacttaagaaatatatttaataagctatcactgccatagtgattcctttgatgaatctgggcaaaataaattgaaaaacttctgaaaaagaatcgccattctagatgctaataagaacattcgtgattcatgggaggaggtgaaaatatcaacaggagtttggaagaagtgaattccaaccctcatggatgactttgagggctttaagacttcagtggaggaagtaacagcagatgtggtggaaaaagtaagagaaatagaattagaagtggagcctgaacatgtgactgaattgctgcaaactcatgatcaaacttgaacatatgaggagttgcttcttacgggttagcaaagaaagtggtctcttgagatggaagctactcctagtgaagattctgtgagcattgttgaaatgacaacaaaggatttagaatagtacataaacttagttgatgaagcagcagcagagtatgaaaggattgactccaattttgaaagaagttctactctgggtaaaatgctatccaacagcatcacatgctacagagaaatcttttgtcaaaggaagagtcagtcgatgcagcaatcttcattgttgtcttattttaagaaattgtcgcagccaccacaatcttcagctaccaccccccgatcagacagcagccaccaacactgaggcaagaccctctaccagaaagaagattaaaactcactgatgactcagatgattactagcatttttaggagtaaattattttaatgaaggtatgtacacacttaatagactacagaagagtgtaaacctaacttttatatgcactagaaaaaaaatgtgtgttacttgctttattgcgatattcactttgttgtggtggtctggaactgagcctgcaatatctctgaggtgtgcctgcaaaagatctttgttttgaggattcgcagagcaagaaatgccacttggcatcaattaatctcaggaagtgaactaaatgccctgctacaacaggaacagaaaaagctcgccttgaagacaacagcctaaagcaaaaccacaaatcccttttctagcaaacctgctgtgaggaagctgatatcatattttaaagtgcacaatttcccttacaggcaaagacagcaaatcccagttccttcggtggcactgggttcaacgctggacttcagaaatttacatgaaagtacaaaaaaccagccaaacacacaaaaatgttatgaaaaaggaaagttacaaaatggctagaaaattgcattcttttctctgcttgattttcgagacctcatgtcttatcacacgataaggccttttctgtcattatgagcatcccatccaaattaagggcatcctacagtggtctccctgggagatgagaggcttgattaaaaggaggtgaatttctcatccctccacagaccttttatccgagctgcaaatactgactttattgagcatctattatgtaaggcaccatgatggggctaacaagacatttctcagacttcacagtttggctcaagtgttcctcataaagccatcatcctgaacagccagagagactgaagttattttcccttcctgggaacttctagagatgctccttcggcaataataatttccatgtctgttttatccattagatggtgaactatttaggggcagggatctattttgctcttccatgtatttccagaatccagcagaggatgcaatcaaactaactaaaggaactgatgaatcatctctagtccccaaacactcttcaagcagtcaacagagactcagcaaacctttcgtggagatccaaaacgtgtgcagtgagaacccatttacctctgatatcttgcaacaatttgtttttgaacaatcagggttcttgcatcatttttcatttacagggactgcgtatgaattaggacacagagcatttgctataaaaagggcattgtgatgtgaaggacaaccctaaattatgtctctaaccagtcaaggctgcctgaagttcgcctggagccagctgctgtaactaatcagcagggaggactcatgtcagtggtcagacagatgttcttaattaagcaactatttggttctccagtgcaaagtctgaacacttcttagagatgggcccccatcacttcaagctcctctcactgttctgattcttcaaaagagtggttctcaaactgtggcccagaccagccgcatcagcatcacctggaagtttaacagaaatgcaaatttccaatccccaggccagatctgctgaattagactgtgtagggctgtggaccagcaagctatatcttaacaaagccctccaggtgattccgacacctgctaaagtataagaaccaccactataaagttttgcccagatggagaatctatatggcttcagtaaatcctacccaagttagcaattgtcaacaacacacagattataaggctgtagttctattcagcaaagccaggactacagctagacaagagggtgcctagggtgcaaaattgaaggaggcgcctcacattctgggtgcctactctgattctctgtgactctgtggaactcgaggcattgtgtcaacacttgattcttgatggggatttactgactagatgctgcactaatgactctctcttgctgacttctcttcccatgagctaatcagcaaataaatttaaacaagcaaattaaatactagtcctcgcaaagtgcaatacttacaattcagtgttctacccttctttaacaacatggtatctagtcactaagaccttgagcacaatgttcaagaatatcaggccacacgggtctgtctgagcctgtatcagacacagaaggctggattaggccttaggtggtctcctcaaaaggaatcatagttgggtgttcagcaccataaatggttccaactggatctgcctcattcttgggtgccttggctcctgggtgattactatttcctgatacttcctgaggctttgcagagcaaatcctggctcctgccttaacacatccttcaacagggcttccactcttctgataatgatcatcacccccgagacaccactgcccaccaccctctccccatctcccacttgacggccatccctggagccacactgacaaaactctcaggccaggctgtagccaccctggcagaactagggtccttttcaatttctctgcatctatctacttgcattattttccctgctgccacctaagatgttatctagtgttaggcagccagcattctcagaagaaggaaatggttgcctttatgtttgggagacagcctgggagaaccaacacgttcatcagtcctacaggaggttgtacaagatgctcttgacacaagagggcaaggtcatgaccatctgctgagcatgaacttgtccagggacctgtgtggtccacccaagcctcagtaccatgacaccaactacttttttcttctccagtcctgggggaggcctgtcatatgctatcagtttgtgcattaagagatgaatttacttagctaagctgtccctgccttccttctttcttttgcccagtggaaggaattgtgagggtgacttggctcagtccattttgccattttctattactaaaatctttcatgctagcaggctctgatgtgagaagtcctaacaaaatgaccccacgaaaggtttgagtcaaaagagaggtgatgagacttaacaagtagatgagtttatttcacttaatgaccaggagatgcccaagaggataatctgttttcctcaaatcatattttgcctcccattcaggaaactaatgtctaatattttctgggtctcctgacatgaaactctcctcaaaatgttcaatttcttttttctgggtgttgtcaattatccttgccagcccagctgggtgctatctgtgtaaactgtccacctgatacatcctatgtaaatcctaactttcactgaagttttcattgaaagtttatagggttggtaaggcccccaaattaagaactcttgacctagctatttagagacaaagtctgtgctccccaggactttacaaatgaggaaagatgtagctatccttacaaggcaccaccccactaagtagggagaattgggccacgggtgcttgatgattttagaggaaaactaggatgattttagaggaaaactctaggtctcaggactgatgtcaggaattacgtgtgtccttgggaaaactatgtatcccagtcctggtctactattctacagcagaccctgaatggcttagcacacaaacggccttggcagaggctggggttgagtgggccttctatttcacacctctgtgcttatgtagtgtgtgtctcagaaatctcctgatggaggactcccaacccttctctctgctgccaccagtgattcccccaaaacacaagttaggttaccgcctcctcgaaaaccttcaggggttccctaatgcctatgacaagcaaaaccttcatgactgggtgccagaatactcttacattctccactccatctaggccactccaaagacccctggctatagccacacccaggcatttactgtggtctgagcactgtccctatgtcttccatcatcctaattagggaaaacttacctagatttaccagactttacatttctgtacctcaacatactcacctgtaaaatgggggcaagagtaataactacttatagagttgtagttaggactcagtgagttacaggcatccagtctcggtaaacctagacaagtaatattattagttgagcattctcctcatggtatggaactaggttcaataagacctcctcctaaaccaggctcagcctcccaaaccagaggtaatgacagctctttctattctcacagcccatgctagtggaacccccagcttgttcttacccaattctgtgtttttatgtgcttgtcttctcctctgctaaactataagcattttgaaggcagggatctaatctaatctattagactgtgtggaagttctttaagggatctaaagtcatttgggtgctagactttagattccttaaagaacttccatgacaacttgcacacagtaggctctcgctaaatatttgctggatgggagctaatctgagaaaaagattaaaagcaggcagccgaagtgcacagactttttggattccatgtgaggattcagtgtgagaacccaggtgtttactccataccacctacccattggagaaatctcatcaaccaaaaagcatttgtacgtgcaactatgtggaggtggctctggaataaactgaatgtgattgtaaccagggatcctgaatggagatttcaggaatccattaacctgcttcaactgtggtaaaaggggatcaagtgtactttttattttttcctagaaagacttcctagagagttttcattgaaggttcatagggttggtaaggcccccaaattaagaactcttgacttagctatttagagacaaactttgtgcccccctaggactttacaaatgaggaaagacgtggctatccttacaaggcaccaccccactaagtagggagaattgggcaacgggtgcttggtaattttagaggaaaactacgggaggctccttcaataattccacagtaagagaccgggaaggaagggaaataacaggcagagagagccggggacttggaagcctccatggctcacacctcctctgcgggtgtggagccaaatttatccatcattacacgtgtgtcctcagcctggggcccagacactcgccattcagctctatctggacatgagggttgttttctgttgaggtgactcaaaaacatactacctcaggatccagatatacaaaacaaggctgttcacctaatgatcgtgcagagttaagtgacacttaaacactagggtaagcctgatacaagaacaaagggaaggaaaagaccattagtgcagagtccccgttgcatctcctgctggcagatgatttggaaggagccttcacgcaggagtctgttttatttgcagaagccacagtggtaaattacagcccatcctagcccattctgggttctccagttcctcttggagctattcctgtcactgcccataggccactaaaacctgcccgcattcagaatgattgattctgctcaaactgcaagtcacaaactcatgtcgaaaaatccacttcaaataagtcattagcttcctttatggatttttcaggtcatgaggaataggacctgaaagtcccatttactggagagtagaaagcaggtgtcggaagaggcgggggcaactggaaaagccacagggagctgggagagcccttgttttctgccaatcaacaaagggggtttagcaaaaatggacccatgacttcattgccagtgccagatattcaaatgtaaaacaaagggccctgaggtctttctgtaaactggaagtcaagggatatggagagagggctcaggaggggtccatctttgctcccaggtcagatggagaatgtggagcacctgggacatagaaagacgtggtaagggaggagtgtctaagactttctcacttgtcatgggatggcccattccagctgggctgcgaagggagaccatggtgggctggtgggataagacatcccagcgacaggaactgaggccttagcagcagcccaaaggcaaccaacatgagaagcccgagttctgtagcttggcaagtttccactcaccacctgacccacgtttagcaattttgatgtaccatgaaacagacagctccagcccaggatgactgcctccctcagcccctctccagcaacgaatgaaagcaagatccactttgaaaattctcccccatcatgcaaactgacacaggcatgcttttcaaaaacccacagccaatctgttgatcattacttatttacaaaggccttcgggcagaaagtcctgtaaaaaccatacttgatacgatatacactagctttttctgcttgtggaaaaaaagtccccccaaggctacctcaaaccatcactttctattgcacataaaatgtagcgtgtaacactaaagtatttaatatatatggtataatatatctacaggaaaggcatttgtgtagaagtatgttaccctggatttggtaatttgatgttttgctgaaggctacgacttaaaaaagcctccacctcatacagaagacctgtcatcttggtacccaagagccaacagaataaagaagtacccttaagcagcaaaactttgacacagctttgaagcatatgaaaacagtataactcctcagaattattattactcaagatcaaagaaatgagccatactttacatagcaaacagggacagggaatttggctccaaaggtttcagatttttcagacttctctttatttatttatttgcttctctaaatttaggtgaaggaaagtggctgggcttttctctactttaaatgggaataactattagaattagataaggtgattacctaaaggtgagtaaataggaaatgaatgctagcatgacactggcatcataaaaacgaaaagcttggcagttggcacattttattcctcctcataaactgtaaacaagcatgcaaatcagccaaacccaaggaaggctgggtgaagtggaaggcagagaacttttaaggaaacatttaacaggaatagatggtgatatggaaaaggagttgggcagggtgagtcttccacggaaaacctgtgtcctcaaccacatgaagaaagactgcccttgcctattttccagaaaggtggatgtggagggccaggaacatgcaaatgttattgaatatggggagtggaaatcaccactattctatttcaaaaatcaaagccggtggccatgaaaagacaaaactaatgtcaagatggcaggcatttccagagcagaaaccacatagggtgagcagtgcaaatctgaaatcactcctgtttcatttgggtggtagagagtcaggatgtcggaggaaaaaaatgctgggattggcagatgaattgaagacaaaaaggggagataaaagacagataggccaagaagaagaaactgcagaacgctgttgaaatttgacttcacttgctatttaccagaggaagccatagtcaagaaagaagtgagggagaaagagagagaaggaggaagggagggagggagggggaagaagggaaggaaggaaggagggaaggaaggaaggaaggaaggaaggaagggaggaaaggagggaacatgtacatgcatgctgtatttcataattaatattgcttttagcctgagcagaactggattacttttgaactttgctttggcaagtccacagattattagactttttcttatcagtcaaaatcaattaacagaaatttgatttcaatcgacaggataaaaggaaggtaatcttcaggttcatttttgattgtgatgatacatctcacatatggccttaagtacagaaaacagtcctcggagggactccagcagaaagagactgccgcaggcaaactaaccacacgagtttctctgattggttaccgccatcattagtgccactgctgtttaggaactacacacagacaggacatggtgacagctaagactttaaagcctatgtatttttcaaacagcttttcaaactgtttttcatgacagaattttttcagctctatcattaactgctgacaagctgacagaataaatactccagcctttaagaagccatctaacgatctcgctcccctcccccaccccgggcttgctggggaggggagactctgggcctggcagggtgaggagagggcgaggggaggaagagaagggctaagagggaaaccgtgggcaaccagcccctctccttacctcatcagcttaggcgaggtgttgggtgagttccgcatgcctccattccgttgctttttttttggtgatagtgttgacggctgctcatcttcaactggaaatacaggcagctcatgagattatgaacagtttgagggcagactgtgcaatacaggcaaaatatcaaaggacacacactcaaggctcagtcactcactaggaattcatggctgtcttttaggacccaatgacaaagaccaaatgtgttagtcaaagaggccggcttagagaaggtgaaggcaacacctctttacactccagcctttgaacatacactttaaacagactaaaacagtttgtaaacaccctgccataagaaaaaaaaaaaaaaaaaagaaatcatgatttatctgtataccaaaaaaaatacttatcattattcttagagttaattttggttactttgctttgcccagtaatagactgcgttttgttgtaaccaaaatcagaaataaagttgtatttgaaatgtcagcataactgccagcctgctgcttctccagatgaaccaacttagctggttcctaacccctgcataccagagaaagagcgttgaaaagaggcaaggattcaaggccttgacagccaatgtttcaatcagatcggggcacattggtgcatgctggctcaataatccccagcccaactcagctcttatccctccaactgccaggagggagggcttgtggggctgtgccaacggggtcctttttcaacccatgaagacaggagcaccggggctggtgaggttggaggagagccccggaatgaaggaggaggttgccattgaatgaaatctctgatgatgcagcagcggggcagggatggagggcagcacaggggattggaaaccaaaagctgttttccaaatgtctaaaccacacagattgctaagcaatgtgaagcttcacttagaaacaccacagcacactctactgctcttgcccaaagacacccactaataagctttgcagatgtattagcctgcatcatgcttctttttaagagaactgcttgataattagcagatgcaaacccagcctgtcacccaggggcatcagcggcaaaattctagtcctcctctccccacccccacaattcaggctaaagctgtaatatcaagaaggaaaaataagatctttggattcttatagttgactgcaacacagactaggaggaaagcaccctgaaactcagaatgcacagcagttaccttaaagctaagaagagaaatattagcagtgatgacatcaaaagagacttgatatatgttaatggtgtaggagtcttagatgggggagaaagtgccatgtcagctacttggtattatccaggaagacccatattagagcatgcattatatggtacttccctgaaaacgctaaataaatttagtaggttatgatacatgcttccaaagctattttaataatccaactaccctccaaacctgcttcaaagtattacacattttacactctcctattctgctgtcagtttgggcttgtctaaaccctggctgatgcaggaaaagggaatgactgtggtgtaaggtgagagtgagaccagaagagatgaaggcaagaaagcacctgcaaacacccacagccgaccccctgtaccacctgcttcctctgacacccaccagggcccaagctcaggccgagactgtatcagtcatttagagctccaggcagagactatgtggctgggatgatatcgcatcttatcagaaatgagtatccaaagcaaatcacacagagactaaacagcacttaaaagattaaaggaaataaatacaagccacataaatggtattgaaaaaatcacttagagttgatatgcatctctcggcaagcaaacaggcactctgagcttgacctgaattcatcttcctttcacaggataggggaccaggcatctgaggcaataatggggtagaaaggcagcgagggtgtgtgggtgtgtgtgtgtgtgtgtgtgtgtaggtatgctttcgcactttccccatcttagaatgaagtagaaagtcttgcactaactagacgtataagacaaggtcatcttttaatatgggccacttgcaattggtgtattgtgttcagggtgacctagactggttgtgtagcatgctggagcaaataacacgtgtgtgtttgtgtgagtgcatgtgagtcactctagtcggggtgcaagttctgtttttctcatcttaaggttataattcagttagacttcttaaggttataatcccacatccaaaggtttttatctaacctagtctaccacggctagcatttttcaaggtcaccagatgctaccatggttgtgtccagttacacaatgaatctagatgagttaagacctgaacagaagtcatcctccctagcatgcctgtgggattattttgctgagcattggcttccctttttgcattgggcctataacaaataatcctctttggttaagtggccattatctttacaccttgttgctacactgatcttcagatgggagagttgcaagttaatacctgttagccagctcaagggagacacctcattctggtagtaaagttatgcctcttctatgcaaagaaactatttattttcattgcaactcagaaagatcatccatcgtaatcatactgcatttaaagtgggatttgttctccaaaatgaaacttgtgtttaaaggtttcctcctgcactcacagcctaaaaatgcagatctgttccctgaagagatgggggaaaatgtctccagcttaaatatatgaacgctgtgtaatggagaccattacatatggcttaggtccctcaagagaagcagtgataacttctttctcataagtaggatataaaccatatttaattatcagcctttatatggatcctatcaatttctgcataaagaaagcagatctaggaaaacttttagttaagctataaaatataattttcatttcatggcttctgtgactacatgagaggaataaaaatggaattaaaagggagacttaaatttactcactttcatgaaagacaaacgtgttgaagtagtgggccactacctcatgacgatgcaaatttacaagctcttatttaacctacattttggctaattacaatacacctccatctatggcattttcacttgccttcatgctgcggaagccacatgaagatatgatcctttaaagaaacctgacttctttagaacacaaacaagttcaggaatctaacgtggaattttataggagctgaactccatccagtctccaagtactcataaaattcaagggcttgtttttgcacatccctaagtataacacttaatgtgctgttgtaacttcccagcgctcccttgtctaataggcactgaatctaacagttttacagtttgggaagactcagtgctagaaaaatgtcaggcaagtctaatgaggcttcagatcccctggtttgcgctagagtttaatttaaagttacaatgatgttttaacatgtttgcttatacttgactaaagaggattcgttatttcaatgacataacctccagacaatgttctgagaattgatttaagatgtggtggtaattccaacagccttaatgcagagttgaacatctgtaacaacattttactcgacttttcatcagcattctgttttcaagcaaaagcaacgtcttccagaaacactggccagaactctgggcttacttcaaaatgattacatatttcactagatttttaaaaaaagaaatatcttcctttatcagccgcgccagactgcaaacactgtgtcagggtttaccaagcctctttatggtccttggagtgaaatggggcaatgattgcaactcccagccttccctaattcagtctaatgcctgcattagatggacctgatgctcagctctagcctggggcacattccctctgccctgtttccccagtgagatttaaggggatgatgccctttaagatttaaaggtgagtttattggctggagttaaaaaacagttcaaagcaaataaactcagaaacgtaataaaaggcaaacaactcataaacatgagtcaaccgctatctccattatgttattaatcaccacatctggagaaacccacatctgtacacacttagcaggtcattagtaatgtcatattcacactggagtcactcagaataagagtcatgcaaagtggtttgaacacaaaggcatctagctaacagggcttccgactgaagtcttgcacaagctgccagtttgggggtgaggtcgttttaattattattaatcgttttttacggttttcccttttggtattttgctgcccaacaagctaagtgcaagctgaaatccacagtagtgcatcgctcttcttcaactgagctcagcatggtaaagtagaatgttgagggctgcagggtagttattaaaaatgggaatgggtcccagtcttccttcacctggctcggtcacaagccgagaattgggagtctccttcttgaactcaaatggatctttggaatagcgtgatctagctgcaaccttgactgccaaacaataaggagaaaagaaaatggaaattaatccatagtgaaatttcttttagaaaagttccaaacaattttaacattgaatagctttgaatcaaactggaagtttctccctcacagctgaattgccatttttttccctttcttttaccctgatgacttcctgcaattctttttgccgtcttattgtcatctgtatcagtagggataatacttctggaaattcagaagacaatcttcttggtataatttccaaaaatatactgagttccccgtcaccccacaacatgtacagacaccgaaaactcagtttagcagcaggatcagacccattctttcctgaagtctgctaaaacaaattctactgaataatcattatattccgagtcatcaatccttggtgataaacttttgctgtctgtctcgaactgccggcttggtcagcccccttagttgtggtatcagtgcctaacattaaatgccgtgagtttgccactcctcagaaagacagatccacggcatttccttcggccgtcagcgacaccagtgaaaagtgggtgtttcaaatgttgttttactaaaatgaagggtatggagtgatggtaaaattcctggaattttacaacagtcgtgttgcaaaatgtaattcaccatgaacaaaactcccaagctgacctaagctctctctgatatgactgtttaagactttcaccagaaagtttgtgcaagttaactctcaaagtcttacggcatggccacaagagcgcagtctctggattggaggatggaatggtgcctggctgtttctcacacgaaccagacgggtaagagggtgtggttgtttccttaagcgatgatgggaaaacaaccacaaaaataataatacatgccagctgaacaacccatactgtgaatttggtagtatgattcctgtaaaggagcacttgactgctgtttcgggatggatcccgtggtggggaatgccatgtgtccatcgacgaggctgagctattaagcacagctaggatcaggcaagccaggcaatggagccaagttctacgcccagagagtagtgggcagtatcagggtgcaggggagttaaagtgggtgatgtccttggaatgagagtttcttgcctgacaaccttgaatagcacatatcactaagaagtttgataagcactgcagtattcttcataaaaatcaactataaatctattttttgaaagatcgtggctaatattttctttttctgagacaaggggtctttgttgcccaggctggtgtgcagtggtgttatcttagttcactgcaacctctgacatcacggctaacattaatccacagattaggaaaagaagaaagatgctgccccttaaaagcaaccccaacgatcataatatctcaaacatatacacctctctaaaatcaaacaaccacattatcatatacattattctggcaggataatttcacaacttctagctaggaaataggaaacacatttacttggaaaacctaatgggtatcagtttttaaaaaatctatcgttatgcagaataagaatttcaaaaaatgtctaagtgacctgtactgccctaggacaggcatagggagtgcccaccccatggtaggctgccagggcagggaagggaggcttgttggagcttttgcatttctggcttttgtggagctaataggaaaatggggagggagactttaaggaacaataggttatgtagaagttaatcacagggtgtatttctggctctattcactgcctaggaaacctgaattgtgtaagtttgagtccatcaacacagagtaatgaaagaattcagctcctccataggagagagaaaaaaaatactatataaatatatgaacagaatccacatgacatggaatgcagtgttctctacaaaatactgcgggcctaatggatcctctagaatccaattgggtaaattagatgtgcccatgctacccatgccataggccctcaaccccaatctcaaactatgttctgtatgcatcctgagaggaactcagcatgtaccaaagccccccatatctagaatcgcagctcatatatcttcgctgtagacttgacctgttagaatcattgcccaacactccgccctgttcagtattcagtagaaaatccttttggaattttctggttgcctttagcccttttctttttccctggaatagactctctattacctcaagggcaaagaaaagtctcaagcaaagatcactaggtattagtttcttagagatgagacacagagatgaacgatggaattctaagaggaaatgcacaattgaaaagaaaaattcgagaacttccctgaatttttgctatggggtttggagaatgggaaggtactaggagatgggagataatttttactttacatccaactgggagggctggggaatgtatagaagtccaatacaaacagcccctcccaactttcctttccttctctccctactccctactcctgacaccaaaagccaactttcggctttgtggcaaaagttaaacctgactcctttaggttgccctagcacttgcagtccgcgtttgtgagggacaacttttagagtagggatgaaacctgccacatcctgggcaccaacagctgcttctttctcatctttctcaagttcaggggtcagcaaactgtagcctgccacctgtttttgtacatcacatgagctaagagtgtgtttacatttttaagtcattggggaaacaaaatctaagaataataatatttggtaacccactaaaaagatatgaaatttggtggctataaataaaattttatcagaccatagccacagttgttggtttaccagccatccctggctgcttccatctctaacgacaaagttgaggacttgccatagagaccatatgggttgcaaagactaagatattaactcgctgacctttgacagagaaagtttgctgacccctgcagtagtttaatcttctcacatttcccttgctttccagtctccacaaagaacaatgttcttcccaacctgccaagacagccaaataacaaaagaaatacccgtggagcccacctgaagtgcacagatctggggacattgggaggaacagaggtagcttagtgactctactgtccctaccacccaacctgctattagccctgctggtccgctcgtgtttgaggtcatgagtcaggtgagtttcacattttccaactcaagctaagttagattcatccacccagtactttggaaagcaaggcgaaccacatctaccgtgagcaattcctcgaagctgtcagcgtgtgctgccagtccaccctgcgagagccccgtacaagacaacagattaaccattagactagatatgttgaaaatatacagcttcaacctttccccagctagctcagagcgatatatagatgattatttcaaccgtcagctgccgcatagatttaaacctctgcacaataactcctggattcatctgccccttgtcaaacttgcacagctttagttggaggatacatggtgtggcagtttcactgtgaatccagaatgatccagacggctgctgtctctttgttaacaggaagccaaactgatgagtttgtaatgcatttcttatcaaaggtagtttcagaaaagaaaatgtgccccatcagtttggctagaatttcacatacacaagattataggcttaatcagaatatctctgttattttcttgaggaaatagataattccacatccattccattaaatcattttatgccaatgaattatgtatttatgaatttataattatccttgatttttcttccccttttgcagtctacttaataaaatcatcagctggagcttacaaagcaatagtgcttaatagatacaagcatgctaatatattttttaagtgaatgctgatctttctgagctgtgtgtctaaaatcatcattgtgaataaaagaattgtaatttccaacccatacatttaacaaagacaaagtggactgtaatggaatttatggagcctgtaaaggaactctttttctaagacggtttataatcaaatagatttggatttactgtaggtcaaatcaggtcccccgatgtgtatcaagaaaaaaatgcctgtaagataccaaacactgctcctggcaccctggaagggctcacacccatggctacagctgctagtttcctggtgtcctcattgtttccacccctagtgaattcagtacttaaatgtcagctttgaaatcaatatttatactgtcttcacttaaaattatgacattctgttcatcctggattttttaaattttgattattttgaaaatattttattttgatagtttgaaaatattgcatgaaactatcatttatcttgattcctgaggttttgggtctcctcttaaatttggtgcccagggcaaaagcttctctcacctcgcccaatttccagccctgaacaccatttctcaaaggtgtttgaggtactggttctgccaccccacagaactggacaaggcaaatctaacacaagacttatttcttttgatcacttcatgctgtttgcatgagattgttaaggaaggcccttgcaacaaacacttcctcgtggatttacaaattgtcaggcatcccaaggagtggagaaaagatcatgctgcctcaggaatctgagatttgccacctgcccagagtgagaaacagaaaagagagctggggtcaggtctctcgtggactttatttcacatcccacatcaaatcctcctggttaacacaatgttgatttacatttccactttggggtgaaagtttttatttgcttacatattttgacaccaatgttactttctttttctttccccccacccccaaacaggttcaaatagccatgactggcagaagatgtcaatcacatttcatttccattttcactttgctgtttacattctttaaattaatgcttgccccaatgattgtgatatttaaagaccagcctagaatctaattgtgtatatgtgaaactgttttctaaaccataagatgttatataaatacaaaccactattattattaacattattactattggctcatccggaaataccatatcttccattgagccaatggtgtcaagagccccctagaattctaatatatattccagatgggtgcactgataatttctttcaaactcagataaaggtaaaatgcatgggtttttagtgcaagccaggtgcccgacgaagaatattctgccagaacactttagaaatacagtatgcttttaaccttgggaggtaaggaccagtgtggattatgactttacactaaacacagcatttagtatatttcttaagggcataatcaccttctatagatgttcttgaactataaaatctttatctgtatgctatcataatttatcctcggacacatcctgtgcaatattttataatgctagtgtatggtgggcctttctggtcaatgcattggagaacaaggtgtggagtgcaacagaagggctggaagcggcttggggatgctctggcctcaccctcttttgcgtcatagctgcactcatacgcagaccctgacccaggacccaggtcggctgacttctaattcagatcatttgctgccagaattctgcctgtgagtgagaacagcatgaggatatgagcttcttgagtcagtccacctgcccaagtcccagctctgaccctctttagagctctgatctcagaccagttactccatacctcaatgtcctacgatctactgtgatccctactggaccaaggacaccaaatttcggagatgctttgggattatgtgacataaccagggggctgcaggctgacagcctgaggaccaactactgtccccagtgtgctgagcttggcaccaccctgctgatacacaggatttcacatgtgggacaatctttaagtctgaagattgtccatacaaatatggatttctaacttctaattaaaaatcttgtagaggactgagtcttcattccaaaagggtgccattctcctggggcaggagcttatcagctgctcaaatgccccactgctgcctactgtacccccatatatagggcagacaccccatgtttgcatttctggccctggaaccagtgacactcaagtgtaccatccccgaaataaagattttaaggcatgggatatccctccacaaatgcctactcacattgagtgggtagagaggttaagagttaaccacacaggtcttaaagccacattgttgggtctgaacctaggtatttggcaaattatctaacttcagttttctcaccaataaaatgagaattagagtacctatctaataggttgttgtgagaattgactgaaaatgtgaaaagcacttaaaagaattcctggtgagctctttctaaatgctacccatgattattgccttggctttgaagagtcagagcaatgagagttctctgctgctgggtccttctccacaccagtctgccacatttggacatggtgtaattcacatgggtccatactctctctccttccccaagcaattgagccgctaaccaacacttagaatggggtgagcattcccacccccacctgacccctagccttgcatctcattcaactgtcacctttgtcccttgtttcatatggccccaatgaagtgctcaagtcaaataattaggttttgccaaatgtcataaaaacaagaaaagccagaaaacgtttaaacggacctcaattggagaaggctggaaccattcagggcaagaacaaatgaaagacagatggggacagaggaaccccactgtttcctctaaattacaggaaattcacgccgtctgattgtgagggcctcttttctttcccttgaatttctgctgggaggtcatgggattgatcggcgtgtgcagacacatgggagacagaagaaggggcagaggcatggcggggtagagaggcagtgactccttcaccaggctctcccaccatgtcttcctttcacctgactacttgaccacccttgaagggacagcctaggctgcctcctccagggggccttcccagatgattatgacaagatcaattctctcctttctttaaaaaatcccctggcacttctgatctcatgccttgcattattataatttgtgttcaattctaatgtgttctactcccccagctaggcttataagctcctctgttggagttcacatatcactgagtctctcacaatgctgggccctgaaaagttcccaataaatagctccgagcagctacagaggcgatgttgcaaaggggagaagcacagcttagtgatcaggagccccggggttctaggcctgccttggatcaactgtgtggccttggcaagacacttccctttcctggggggatgagcattagttaagtatgagacccttctggctctgatttgtaatgactctgagtttaatgtcgggcatacctttttcttgttcttttctttaaaatctttttaaagatgcacaataagagagaaccacaagcctagccagagaaattagataattgcattaaatacgaatatacgaactcataagttacataaatgcaacagtacaaaagatgttgcatgagaatgtcaagggagggctacatgaaatgtcttagacaataagttaagtcctagagagagaattgttcaggaaaaaaaaaaaaaaagaaaggaagaaaaagaagacgacttgaaacaagaataggatgaatagagaggtcccgtatatccccagatggagcacagggcctggcactcagggggcacttgacccatgatgctgaacagactaaggagtggcagtagagggtgggaagggcatgccaggtggaggacacagtttgaaccaaggcaaggtggttggaaaatactaaactgtataaactgtaagaaagtcaatttggctagagcaggaaaatgtgtttgagggcacagttggaggtataaagggcagagagtgtaagcgtttacattccaaatgatagaatttgcacaatatttagtaataatctgaagcctctgggaaagctatttttcttctgatttaaatactgaagttcaaagaggatagtgggtgggctttgcatcttgcaaaagtctatcagaaactgcctagctcgctcagcccactttcctttccaaggtaagaaacacacattcatgcatggaaataaagcagggaggcccttggcaactgtccagttccattgaagttctcatttttcttttttttctggagagcttattcaacaggaaaataaagttatctaatgcctcagaaaggggtcccgtgaaactcacaaggcctattcctcacagcccagccaggtaaatttaccctgatttcaggatggctatttcttgtcttcaactactccagctgatcccatcccctctacagagaactggaaggaaacccgtcagggtttgacttttacatgaaaactgactgcaatccatattttcaaaaaatcattttcaacaaaaccagtgctttaaaatagattcactgagaagaaaatgtttccccaatcctctcctccttgattttgttgaatcaataacatttcaagatgttctctgtgaaaatcacatgggtgagttaaataagaacatacattacattatctagatcctcaacttgcagcccttagcgcagtatgcctgagaaaagtttaaaaactcaaaagagagaaatcctattcaaagagtaaaatactgcctatgcttccaaagttctttacggcctgataggtagaaatttaataatgaagggctgggaatggtggctcacatttgtaatcccagcactttgggaggctgaggcaggtggatatcttgaggtcagttcaagatcagcctggccaatatggcaaaaccccgtctctaaaaatacaaaaattagctgggcatggtggcatatgcctgtagtcccagctacttggtaggctgaggcaggagaatcacttgaacctgggaggcagaggttgcagtgagctaagatcgcacaactgcactccagcctggatgacacagtgagacactgtttaaaaaaaaaaaaaaaggaagaaaatttaataatgaaaaacataaacaaataagtgagtcatcctgagacatatttcaattctccccttctgtaacctcaataaattcattttctcccacataagctaatgtttgcactaaatattctgtacaaaggaataccgcagaccataaaaaaaacagtaaaaagatatagctgtgtcttttttaaaaaacggttgaaaaattgggtatgtgtggacaaaataatttttaaaaatagttttgcttgcacatttgatttctctcttcatttatgatgccctagttgatgagctgatcaacttttctgtgaaaagtcttcctaaaaaacagaacaaaacttaacagaaactctgatcctgtttgtcaaaatgtagttctggccccgagagaaaggcaatattctttggatgacttggattctaaagcaactcttttattagtattattatttactttttttttttgagacggagtctcgctctgtcacccaggctcccaggctggaatgcagtggtgcaatcttggctcactgcaacctctacctcccagttcaagcaactctagtgtctcagcctccaaagtagctgagattataggcacctgactaatgtttgtatttttagtagagacggggtttcaccgtgttggccaggctggtctcaaactcctaacctcaagtgatctgcccgcctcagcctcccaaagttctggggttacagacgtgagccactgcacccagcctggattctagagtaactcttgatgaaagaacatcatactaaggtgatttttatataaaacattaattcagtatatcaatcagtcactttaataaaaatgcccctcattatcctgaggtgaatagaagcctatgggattaatttgtgtaaatagatattagattaaaatgggaacttgccacataacaataatcagatagcataggcaatccaatctcagtgctgaatccagtattgtgtgtgtagttaccttttaaaaacagtaacatgtatttaacttggacttgcttcaagtaagcactgcatcaggcaagttggatttcaaataaaccttagcaattgaggggcattgtcgtactggaagtatatctcttcaaacaacagcaacaacagttttagatatttattttagagaaataaaggagacaatctgcaagagaaaaggcagaaagtgaggaggaggagagtacctagaatccaggtagagggtttatttctagaaaagcagcgccacctgctggtggacctgcatgtcaggcccttctgcggcttgcaggccatctgtcttgcaatctatgcataaatacacagcagtatttctcagctgctgttatacgtaagaattgtattaccagtaggcagatttctaacacactggttgtagtttaataatcctatattacctgaagtatgggttatataaaaacctagaatgttaattgttgacaaaccaattctaatatgtaaagcactgtaagtcacccagtaaatacacaagtaaatcaaaagggatagctctttttgctctaacaacgtgttattaaaagccacaacttaatcacttacataaaaataatgttcatgaatttcgatgtactaagaaatcaggaaaatgcattataatcttactaacagagcttttccttcacttacaatttagaggaaactattttgcagaaaatatttttccctttctttaaaaaatgtacctaaaccaacatgccatttaggaaatttgctcctataacaaaacctagttacaaacaactaagattacatctataaaatgttatatttttaaaatagcaatagagaagttgtggaaaatatgtcactgatacagtgagcagagaaacactacctgtcatttttcaggaaaagatcacacaaacgcgatagcaaaggaacacaataaaaagcagaaacaggaatgtgataggtgactctgattgcatctgcaaaggaaactgtgaaataaattaacacccaagtacccaagaaaggcacattgtggcttcactggaagtgatcattatgcaacagagaaggttggtgattttgtaagaacagaaataaagtgtagcctgtgaaatctagtggtgataactaatgaccatactacttacaactctgatttgatctctaacataaaaaaataaaataaaaaagtactctaaagaatagatgtatgcaatagggattgtgtttctcacttgaaacaaataaacctcaaatgggatcaaagggccccggtaaatgaaaaatgacagttcctatgttgccctgatttgatctcaagcaaaactaccatgctgataacatagcaggggatgtgaggaaggcagtggagttcttggattgctatgaaaaggaggcgagtgtgtagcccattcagctgatgggaagcccattctaattccaaaaagttattgagatttaatctctaacaacaacaacaacaacaaaataactcatgcggcaaccaaaagggtatcctttaaaaacacacatacacaattttgttatttccaatacattctgtagaatctctttacattcaattcttccatctgtctaagctgggtaaggcacatgtgtgaagagaaccaaatgtcacaatgcttgctttgagaacgaagtgtctccagttatccagacagggagcttgactaggagggtctcaggcataggccatgggcatcccatctcccatctcagctggctaccactcactctggagagacagggtttccaggagcaattctggacagatgcaaagggtgaaggggaatctggtggggttcagggctgtcaagattcgagttgggggcttaccctgcctagatataactcctagtgttagcttgtgtattagtccagtgagataaggtctaggccattggctagggtctgaacaattaaaggtgcacaccctgccttaaatatccaaatttatttgggataaattcaaatcaataaggaaacataggtggatgaacagaagcaatgggtttgccatggcttcctaccccgactcaaatacccaatgacatatggaaggagaaaacatcagcacccccagatccactacagagcccaccatgtgctgtcagcagaaacaacggaacaaatgtgttaccttcagaagaagcagtgatcaatttgagatcaatctattcaagagttgtccagcagtcaaaggaattggctgttggctgttcagaaacaaaggttctgttcaagaaggtataaaggaacaagaaggaagaaaggaagatctctagccttgagacttttttttttttttttgcctctggttcagcttctcatgaaagacctttttccttgagatacatgcttaataaactatggaaacatattgtcaacagagtttacatgttaatcagccatttattgaattcacactgtgtgtcttggttactgtgtgcaatatgctaagaattcaaagaccaattttgacttctacaaaaacctcaacataaaaactgtctaatggggtttacatgaaatgttacaggcttacagaaaagagattcactttttctaatttggtttccgggtgggctagttaagaaggcttcacagagatggcagtacttgagctgtaccttcacagcagaggttggccaactttttccctaaaaggccagatagtaaatattttgagctttctgggccataccctttttgttacaattactcagctttgcagttgtagcctgaaagcagccatggacactgagcaaatgaatgggagtgactatgttacaaggaaactttacttactacaatggatggcaggccagactgggcccatgggacagtgtgctgacccctgctctgaaggatgggtaagttttaatctgctagaagcagagaggaaaagaatcacagtctcaggaaaaggttccagaaatgtgtaaagtaatgagaataagacgcttctagagaattgttagatgatggatgcttatgtggagaacggaactagggaaactggttgaggccaaactgcaaaggctttgaatgccattttaatagcagaaagttggaaattatcctcttaaaaaacaaggaaccatcaaaaggtctctctctttaaaatgggataacatgacaaagtctgtgctttagaatactaaagttggtggtggtttggtggcaagaggaactaattgaaaggttgaagggcaacaatggcagactagctgaagaagaaatgagcatgtgagcttggcagtgccactggcaatggtgagaaaaggttcgaaatgtaatctggaggccaaatcagaggacttggccatcggtaggaggaaagagagagtgttacagggtaaaactcagaatttcaaatgtgcatattgatactcattccactcatccctagacctatccacacatcaggtctgctgaaagaaagggatagtggtaaggcatgggtgaaaaacttgggcccagtcttggccttgctccaagcactcatctaattaattacaaaatcaacaagaaacagagcccagctactcataaagcaaggtaggaaaggtgatgatgtgaagtctcaacaccaactggacctcaaagatatggccagacatggtggtgcacgcctgtagtcttggctacttgggaggctgaggtgagaggattgcttgaacctaaaagttcaaggctgcagtgaactatgatcacaccactgcactccagcctgggtgacagaaggaggtcccatctcaaaaaacaacaataacaacagaaaaagatgagttgagatcaagaccatcatcaaaaaagaaattttgatggaatttgaaaggacaggaatgtcttctttccccatctgttctcctctttttgtgttccaactttccctccctctcccaaaaacacattgaatttgctgacgatctccagacctattttagggatggacaagccataaagaaggggtttcagggggatgaggaatgatgagacctgaagtcacagttttctaatgatcccaggacctaaggattctaacagctgggctaaaatctaagacacacatttattttcatccatcaaatctgtactattccaactaggaagcctcttttgcctggagatggtgtccccgtttggccctatatgcttcctgctacacgatttcattcctggagacctggcaataacaaaacaaggtgtaacaaatatgatgaggaggctctttggggaggtcaacagttagcattcattgtgggagggcagggccatttgtagagacactgcatatgaactggtctgggatagcttcagtagctgacaatgttctgattactaataacccccaaatcactggagcatagataataccaggaccccgggttagggagagggcctttttctgtgctttccttgaggaaaataaaagacaccttggaagaaaacaagctgacaataaagtagaaacctgtaagaatcttctgggctctttcggtgtgtccctgtgcgcccagttcctgccctagaagctgcgaactcacagacagaagactaacactgatatactacgaggtttctacacacataattgttcctcacaggacctaccacgatgttgggtaatagacatcagcattttagaaggatttataacagtaaggattgaagcaaaaaggacttttagcctttctcaatcagaagaaggaagataatcagagtctcagagtttaaaggaaacttagaaatatgaccttccaatttcctcattttacacacaaattttgcaaggcctactggatagtcaagatggaaatcaatgttctggggagatatagctgtctcttggtatttttgttggcttatttctgttgggacaattattccatgacctagaaattaaacaaattgactccatttaacttttatagtctgttatactaagctgttcaactctcagccactatctgtgggcttctctgcctgtagctgatatgacctcttataaggctagcttgatgacagtcagtcatttgaaaaaaaaaaaagcactagttatggttaaagtggcttatcattattatttccatcaatactatgggagatggcaagcttctgatctagcagtccactcatccgctatgtgatcttggtcaagttcatctctgtttctttgttaatttcatatgttaatgaaggatgataaaaataataattcaacatataccaggcaatctttatatatattcactcactgaattcgtgcaaccactctgtgagataggtccttattatctccagtttatagatgaggaagctaaaaaatagtgaagttctggaacttactcaaagtcacatggtagtaggacatgatgtctatgctggggatgcctagatgaaatgagatgatgttggtgccttgagaagcacaaagactcaaacacacataagacattactcttattatagccatgagcatctacttggtgaacatgtcaaagcatgacttcaccaggacttacttccaaagtttccagaaaattcacagatctcacccttgtatctgcctgctctgacgtttcctagaatttcaggctgtaattgccaacaagatctctcagttcactgcacagtgaggggaatggcatcagaatcccctaacatagagaggaggaaatacaggagatgtctgcctgtttcccatcttcatcttaatagaagatgtttgtgaaggagcagtgtttccagcaaccagccccttgcaaatttcacattcatgccctaacttccagaccctgtgacatgacctgagccccttcctccctgtcttcattcctagcatagttgcagcttttattttcacctagcatctctcttctctgcaggtcattgtgcatcccttctcagtaacatctgtttagggctttggttttgaagcatccctgctggatatgttctctcagttggatacgttacaggccatatgtggaaatttactcatctgcactgaagaaatggccagatcagccttgacaaaatgcagagagcatttcagaaccattcaaaggtaagggaatgcttggtgcagcctgagagagctttgagaacaatcaggaaaactcttccttggcttgagcagaacaaacagaataatggctcctaataggtaatagctatgagacattcagcttttggatacctccacgcgggaggaatcatttgggtgctgctgttgcattcaagctgcctacctcgagtcagagtcaaattaccctgaccgccataaaaggcctcgaatgttgctctacatttgggcaggttgatgtgcccacctgcagatgctgacacctctctagctacaacagactcctttcctcacatgagccctgcccaatgcattggttttatgctgccctgactcacaccaaaataatcaggtttgctgaaattaataaaactgaatgtgaatgtcacaagtccttgattttccagagcaaatgctctatatgtggtagtaaccctgccactcctcattggaagcattggtggatttttgcctatgtggttttttctggtactttgtttccagatcttctttcccataatttatccttcacaaagaatatcaattgcacctgccatttgatcattttctagttccttcagtcatgtccttgttctttcttactacatttttccctcttactcttcttgtacatcccagttttttatgtttacatatatatactatatagtaagttgctgcttagaaagttttgggaagcttcatggatctagggcgatctggcttctagcacatcaccaattcctttaagggttgggaagcccttcatttattcattcttttactcatgaaatatttactgaactggaatccttcaggccatttcctattcaagtactcttgccaatataggaagcccagccaaggatgtcagcatgctacatttttgaccttggagggagggaaggcagcccctgggtcctttcttgactgagtgtgatccaacaggctccagcccagaaagctgacattggccaaaatgaagatcattttaatgcaagcagtcagctcccttcccagaagatagcccatgctctatggtgtgcagatgcccatctatgcactgtcgatacagctggtgcagtgccagctctagggctggagtctttctcacttcatttataagtctctcagtgcagtcgatcatccctaatgcagatctgcctcaaaagattccattttctatttgcatagggttttctctgcagctctaggaacatttggtgggactcatcttgcggtattgaaggggctagaatgaaaactttcagatttactagaaaaggctgggggagttttttcttgctgtttcccttgaatatgagagattagctccccctgaggatgaccaaatgagatggtctgagaagaaaggccacttttgttagtcctgctcatctgagctggacatcaaaagaatgtctcctcagaataaaaatctgtgggcatgtgtagcaatctccctccaaagcaggcactatctagctatttacagaaaggcctttgcaattccctctgagatttcaaatgcaagggtctgacaatgctggatttagctctgtccatttagattccctttgggaaaaaggtcagctggggaagcagaacccctgtaagcagatgtggcgatggagggtcccctgactatccaggtaattcaacaagctggtttgggagaaagccccagagagagaaggacaacacacagctggttggcttggtgcattttgccacattgcacttccagaagttggcattctcagcatgcacagcctaccaccatgagggaacccaggactcaagtgcttttccatgcagttttaatgaccccctgaggtcaatggtgtacacaaatgccacaatcacggatgctgacataagtaaggacacagacaaaggtcttatgcacaaagcagtaaaaccgaaaagaaaattgtgcatgatacttagaaatgccacatgacttctttaggactctgtgtggcagtacttcacaggaaatgtgttttgtatttccactcgagaaggttaagtgtttgaaaactacagtggattttcagtgaatgggatgtgaagcactttattattttccccccatcgatgtaaggagacatgctgacttcctgagaaaggaggagaaaagtctccttgccatatacagggatttaaagaataattcccatgagctctaactgaagctaccacctgcagctggaagcaagagcctcagcgctggccagctgtccccactggtggctcccacttgctttgtgtctgctgctcagcctgagccaatacttcacaccagcaggtgagagctgcctgcctgtcaccttcaacacactcaagatgtaagatatatttgaactggggaagatgatgaggaataaggaagaaataatggttaggaaaaggaaacagaagcagtagatccccaaggccagtggtagtggatgcagccgagtgggtctcctagtcctgggtcaggggtcaggaaatcttcctccaataagaaggaaactctagcaaacccagctaggaatcacaatggctgccaggtcagctggggagaattaggctcatggaattcagctgctccagagccactaattaaactgtcttttaaagactgtaacttcttggatttgcatctgggcaatgtgcttcacctgcagggtcctgcagactatagatcaagtcttccttctgaaggcttctcagaacagctggggcccgcccacaacaggctcccctctgtttgtctcctccccgagaggggggcttccagctcccctctagtcagtcccttcctcccctgcagccacagcagccctcccaaaacaaagcctctgttaggtcacttccctgatcaaacaccaatatgatagtgtcgcactgtctaaagactttctatcatattacagactaagaacaaaacccttggcctggcccctgccaggaatggggccccattttacccttcaggggggtcaattccctgcatgctaagtaagtcttaaactctagccaaattgggtggccagctgctgtgcaggaggcccccccaggactctctacattatctcgaggtttcattaccagaatcctcacttttttctcctcccttggagattaagtgacttatccatcatattcaactgcaagagtaactgagcaactcaaccgactccacactctgtggagccacacggcctgtgttgaaatcccagctccaccagtcactggctatgagacccttggcaagtcatgagactgtgacatgaggctatgagacccttggccagactcactggctatgagacccttgtgccttagttgccttatctgtaaatggggcacattgcagatgtctcaggttatagttgcctcaactgcaaacagcagttaccacataataagggttaaattaattaatatttgtggtaatagggggagtagtgcctgtaatgcagcaaatgctatataagtgttaaatttaacaacagcaacaacacatacacacatcctccctgtgtactcagagttgcttgcacacagtaagagtagagactacactaattctagtcgtaacatgaatccaagttaaccaactagccatttcttagtaatgctgtgtcaacaagtctcactcccttggtgatgcagtatacacagaatatagatctctttggggagtgaccccatgctcagataagactaaaacatgatgctagcctcaaaagagaaacataatttttcagcaaatgttggtagtatgcctccctctgtctctcctcaccaatgagcatgacctgcttatgattactaggtccactccattctggtttccatttttggctgctctgtgcttgcagcttctaggcttcactgggagtcaaagatcccaaatgttaagatcgttttgaagagcatgctggcaaatgtcctaaatgtgctgggccagatgacaagcatccatctccgatgaaggaagtatccaactgaaatgatgggcaccatatgagaaggagaatcccaaggcatgatggaaaccacaggtgctgcagacccactgtccgtttctgtctggatggggaaggaaggcaggatgcagtgaagcctgtgccactgccccacaagcctctctcgagtgacttcacaccattattggtctgatactaatttgagacaatacccaatcacatcacaacaaattagccacagacacgtgatagcaatcaactcagggggcgatcctgaatgcgggctgggggattctccagctccgtgagccgcacgctcccacagatgtttctaaaagcgtcttcccagaggcccatttagagagaaattaaatgcaacttcgacttaattaacgttttaaatgataatgaatacaatgtagattcataggaggcatttacattgtgttgtaaaattgataaaaatttaataactctttgttaataagttatgtctccccagacccataaagcctaaggcgctgcaaactccacactgggtctaatcgaggctcctggtgcaggtggaggaaagaggcagagacggacttgacatttgctccaagcctgctctaattcaaacctctgcttgttcatcagtactttatttcatacagtaaaggtcaggatttgggctcaaggcagagccttgacaagaaagctcaagtggaaggcgggctggccctggcatctgtcgcctgagatagtggaggaggatggaagatgaggagctaactggccacatctgccctccaccatggaggtaagaggaagcattcactgcctggtggtagaagctgtcaggatgagtatcctgagaaccggccactgtcctgaaataaaaaagcaaacataatttctatgtcaccttgcataagggcctcttctgggcttacatgaggcatgccaacatcttttctagtttgtccttaaagagccgagtcatttattacagcatggtgtccctgggaagaaaggtgtcccatgatggggtatacacaaaggaccctgtcagcttccctcattctgacctttctccttcttgtttcccaatcctgtttcaaagaatttcttttgagaagttggctgccttttgcctactgttcccgtctcctttcatctacctgcagtacatcttcatagtgtattcatcttcaggaattcaaccatactctttttttggaaggtggtgaaagcacaacaaggtccccaaatacaagccagtgactttacctgacactcaactgaaacaaccagctatttattctggagaagaacccagtgtgttgggagctcttgacagatgagcgatgtaaaggatccttctcaaaggcaattttgcccaagcatgatttctgccttacaatgctgatttaagaagctgcccactgcacagagtgagctaaggcccacagtaaggcatatttccagtcaacctatggctcagcgtggctatcacaaaatcaagcaagaggcagtggcttctgtagcctcacctgctaccaataagagtgtcttaagaagccccttccaggcccatcactaggtcttagtcacaggggatgacccagtggctgcctaggccgatctgccactctgtttttacttcctgcaatgaagtacaaagggtcaaatcaagacgcatgggccagggtaactaaagagccaggggacaacccaaaggctctggtagtgtttggtgtgcacatgtgtgatggatattgacacagagagagagagagagcgcactcacatcagcacggcaagcatgggaagatgggagaaaatggagactcagacgaacaggctttaaaactaatacatgaaaaactatgatcacatcgattcgtgcttattatccttggctctcctttttctgtctttttctcactggtagtggtggtggaaagaggggagtaattgattttagggcccagaagtaaaataagcaaatagaatttaggtttggggaatttgaggaagtcacctaaaactgcacataaaaggaatgagataattataggctgttgatttttaaatgtagcttattaaattaactctcctttaacaggcgttggagactgtcaggatagggtgtgtcctattatagacattttcctagagctgtttccaccccctgcccttgtatctgattttatgtacttcaaaatgccattagttcacttaagtgactttagttctattgacaatgttaattctctgtctgcacaaaccaaaggctactcaggataagctgatttttgtttattatctgacaagactcgatattacactaaactgattttggtacgtctcccttcaacctaatcatattggacttctctcagcttaaccatcggagttgaatgccttcttgtattatatttatacccaaaataaaagtcatgtgtaatttaaaattagctacagtagtttgcaaaaggctgcatgtaattgtgcaggtttaaacaattagtaaattgaaaggttggtgtgagcaatcacacatgtactttagctaaagctggttccaagtgcaagtctaaaggtctgcttctcttctaccacaggattaatttgtttgtgccagagttactgatgctttgtgactagaatcatgtcaggcaggtctcagcaggtctgaatcagtatggccctacgttgccactgcatcataattttaattgtccctttctattacatttagcaatcagatagcaggcaagactgaaataacaagaataaacttctaaagagagagaaaggtccattttacaaaattatagtgggaagaaatcgtactgattggaatctacttctatatttatgtgcatgtgtatgttgctagacattcattttttacatttaatagtactagaacacagctacttgtgaaaaagccgaggcccataccatcctgatgtcttttgagagagctgggactcttgcccaggaccatctgaagtggaaacaaaaccaagatgatcataaaatgacactctatgcactgattctagcctaccatattgaacatttcagtcttgccagaaataaaatccttttgtgatgaatccttatcggtcacaatttgccttacttttctgacaccttttattttgatttttgtctttcctaaactagtccttcccctctgaagttcttttggtcaacacagtctggccttccatctcctcctgagttcaacagaagacaactatcataatagcacatgactcaaccgatccacagtaatgggccacacctccatagaggggtgcaccgagcaggcagcccctgttgttagaaggcaggttttcagaactgtgtgagcacttttaatatattaccattcctctgggaaccagctacttctcttcccacttcacaaaacacataatgggactttgtgtttcaatttaacatcccttgaaaacggaaatttttccccttataagaaaaaaaatagagtaaagagggaaacgaaaggaaagagagaaatgaattaggcagtctccaaagcacactggctcaactgggaaactgcgaccaaagcaagctccataatagtataatgacctttaatgagtgtcttgggaaacaatacagccctagcataaaagacaaagggcaaaactcatcatggctctgctgacactaattcaaaatgattttcagaacaactaaagaatgtaagagaagtaatctgatccgcccatctgacctcactttgattcaagggcccttctcctgccatttctaattgtcaaaccctctacatttcacatctgttcatatttaatgaaaagcccactctcaccactgctcttgagtcaacttgctctgtcaaatgggcaccacccaactccaccaccagcgagggatgcctggggattgctattggagcactgccagtggaatttcacatagagacagacatttttataattggagaagaagggcttatgcaggcccaaaaaggggctcaaattggaatggatttttctaacttattattaatggtcaaaggtgagtggtctcacacagggatggatgaaatctgcttttgtttgatggagtgatgacggcaggacgactgatgaaacggagaaggcaaatcgccccctgagctgtcaataccagttaaggcttcaacacgcagcccaaagctccacgtgttccctggtgggggctgattttggaggcaagggagggacaacatgccactcacagaatgtttcttagagaatgggacaatcccaccccaaggttttcttctccctggtctccatcaatggttggattaaattgcacagctgagaaatccctctaattaagatttctcttggatataatggaaattacacacactgggcaccatggggtctacatgggggacacagagtgtgctgtgattggtattgttggccagtgccaagacatgaccaaggggccctagctcagagccagagtggctcctttcttttctccactgagtctaggctaaggttttagagcctcatgattatttgagaacagaagttgtgcattaggcagaagagtaacccgggggcttgtggttactttcaccaccatcagtcaaagagatgtgaccaattcatgccacctcaggccctcctctgctcttcctccccagcacctatctttgaacttggtgtcttgctgcacatcgtagacagacaagttctctgtgcagctgtgccctagcttatctctgtaatggcatgcaaactacagataactcttcaggggaaaataaagtgataaggattcatatggtagcatctaaggattgtaacagaaatctttccaagattttaggcccatatggcagtccacactccctctcaatgcaacctccattaggtattactttgaagtgaatcctgtcccttggcactgctctggagcagcaggaaatcgtgaatcagagagaatgactctctggtcctagatcaaagttttccaaatgcctctaatatggctcgatgcacaaatcatgctttgcacttgaactttgggcccaaacataagcacctggcatggcacacagtgaagtcccggttccctgagccctagaggcctcatggatcccggctacacagccgcactctgctgggaccagcctcaacaccagcacaggggagtcaagccagttcattttccatgggaataaatgcttaagagctcagtgatcttcttcctcctgtcgtcagtgtacacctacccctgctaggaaagtgtagctcaaccagctctgagcacttggaaggtgagaggacagggagcaagaggttagcaatatatgtgttggctgctttaaagaggaagggaggaagtgcagaaacgagaaccatctcctaccttctatgctaccaaaacatgaaaacaaagttatagttatacttcaagtaaagtcctccagtggaaccacagccttttctgcacttggaccaagacccacagtcccagggtctcaaactggagctttcaggaacttcacttatgaaccgtatcaggaaaacagcaaagtccatggggaagcaaggataagggaggtctcaggaaactggcacatctcagccttgccagctaccagctgcatagccttgacaggttctttaacatctctgagcttgtggatgacaaagaagactgacatcagaggcctgtgctatggactcagggatatcacagaggtttctgacttaaattttttgttggcatttggaatcacaattgctgcaagataccttagttaaacaggggctatactattggaaaaataaaagatattaatggaacagtccttcaaaatagtcatcattctgagaaaaagctctgtaatccactagcccagtgcaggctgacagacatagaaaactcgtttccagaacaaaagacaaaatctggcactggaggaatgaggcacaggttagagagacatagtaaaaagaaaatatatatatatatatatatatatatatatatatatatatatatccatctgcatcaaaactctgttgtattttggaaactatctaagaaactatctaagctcactaaaagcaattcaatgctagagctggcttgttctcgctacaccctttccttcctccctttgatacaattcaatttacagccatttcaaaaatattaacatgtacacttctgcatatctctgtattaatacagtaggtgatatgctgtcactttaatttccatttatatttatttaaaggagagagaggaaagatatcaccagactgtaatatcacagtcctgcatgctgttacgagaagcgtaagttaagaaaatcagaagggaggccttcctaggcacgtacacagagacataggcagctggggcaacatgtcagcacacaggagttcacactgggaagaagacatcagcccgactgactcagaaccacagggcacagcacaagacagggatgataccacagacagcacaaacatggaactacgtgtgttgaggttaaacttacaggcacggaaactggtggagcaatcattaacagagacagaagaaagtgggaaggctctctcaagggtgtccacgttaccacgcacacggcctgacatgcatgagcagtcacgctcagaacgtccgcaatcaaaacaacatgcccgtctcattctcttgtagatggacatcttggctataaccgtgtggttggatgggaggagaggaagagcggcaattaatggcaaggtcacacacagcaaggcagctggaagggagctgaagggatttaacacaggtcttagttcactttaacagtcttgacccagaaaaaaatgcagagtgattgttggtaacagtttggttgtacatcaaaaaagcagcgaaaatataaattgcctttatcgtctcccaaggctgttgcacatgatttttctcccctaggtaaagcggtgaccacaggaaaagggcatggctgaatacactcgggttctcaaatgggaagaagagcaaattatcgacagcaaaaaacgtaaccaacacttttcccctgatatgattaatacaggaggacaaaatatacacactgccaatcaatgaaattagctgcttatttggtataataaatggtttttgcaagatgcaaaaatatctaatatgtaggctttctaatttccatccatttctgggcattaggcagaggctgggacaagctttcatcaaattagatgtgaaacgattacgtgttaatacagtatctaaggatgcctttgctgaacttcccgagagtgagtttatatgatggctacaggaatttaaatttactcttgacagaacaaatatccaaatctgtccatataagaaatgcagctactcaagactaacgctgcagatttgacattaaaggcagttcacaaataagaaatcaccaaaagcatatgagatgttgctctattggaatgcatttagctactcatgggtgtattttctgcttaaagctgagaggatctgaaaatcgcatctgcctttctctccccaccaaatagaaattcaggaagcaatcaggctattggttaatcatattatttcttttttccttatacagaaaatattcgccaaaatcgattaaaactgacaaaacatgaaatagaagaataggttccacgtgaaatatcttaatgcaatttgcatgcagcattgatagctcttctaaagctggtatggtaggttctgcactgcctggggatccaaactgagtggtaacctataaaagttgttggaagtcagcatcgtagtttccaatgcccttcacctttgcctttcaagccaatttatatttcagtacaagagaaggtttttgtacctcattttgatgctacaacaggcaaacatgtttgcttatcacttatcatgaactggcctgcttctctcacgaggtgggagaagaattcacatttattctaagcattactgccaaatggtaaacctaaactgaggaggtgttattccctgcacccacaccttccattttgaaagtcatttcccccactctttctttttctttgtagagaatggttgcactcttattttaaaatatggcttgtggttttgccctctttgaatgttacagtcaccaggaagaggggtttaaatctctcaaatgggtcaagtcctgttctaagacctttatgacttgccatacagtatatttgtcaagcaagggtaacgttatgattgtgaagaacaggcactgggggagatgaatgagagatctcttcagcagcaactccattcttgtaaacttggctcacatttttagtgacgtgttcttttagtgtcctagctagtctgttgttcagatcatcatgcagccccagccctgttcaatggtggtatatcattcctttgagctttagcttttaccaaaaaaaaataaaaaataaaaaagttccactatagcatttgaatcagaggaatttagaaggcatggtgtgaatgcccagacatcccaaacaaacagcaacggctgaagtcaagaaagggaaaaaagtcttcaattaaagacatgaacataaatttatcttaaatgcatccggatctggcatacaatctgcagacattcccttgttttctctttcttatttcttttactggaaatattgatttgttatttacacagaagagggaaacaaggatgatttttttgcttcaccgtagataaatcattttgaaaaacaatttttttaatcaaatgctgtagcagaagagaagcccatcaaactctggaatgctatgcttctcattagcaacggtccctggttttcatttccatactgccattttgggtttatgtacaataatagaatctgacacatttgtggagaaagaaagttcttataaatataccgtctttaaggataaggggagggatgatggggatgaaataacttttgaaactatttgttcagaggcaaacagatcagaatgggtgatgtaaacctcctccttgatatgagttcaggaggaaacacagtgacaaaccagtggctctcagggactgtttgcaactgttattgttagccgttctggcgaccatgcattgttctaaaatttcttattgttagcatgcaggaacaggctgaaactggtaatcgaagcagcaaaaaaccatgtgctataagaagattaactgttaattataagcagtcacattccaaagcagcatatgcataaaaaagaaaacatgctattacttgtcattccttcccaatcatttttacactcacaccaaatgcaaaatagaaatctcaaaagacaaacaagtgccaccacacacacacacacacacacacacacacacacacacacaaaatcagcaagaacgatcaatgagaggctcaaagacaagacagaaacagttaaaaactattgagccccacatgttgacaaaccttcatgaatcagaatgtctagatcaaggtgccaccaactgggaaggtggctctttttcgctactgctggcatagtccatttccattgactccctgtcaggtatcttcacctagagacttctgggtccactttcttaaaaggtaagacctcccatctggtggagcgattcatcaggcttgaaggatatgagtactggccaggaagagctctcctctgggccattatacaaatcatgaacaaactctttaactaaaagctgatgaggagttgtctccctggtggtagatgttccagaagaattgaacactctctgtgtaaaattatactcttaagttgtaaaattaaattatatcaaagttaagtcatggacctcctaatttggaaattaccacccctcatctctctcaactctctctggcttcctaacccttcaattttgttacagtgaatcatggatattcagaaccactggtgttttgtttccatttctcagtgactgtttccttttctagagctgatttaggttagaaggttaattttagatatgaagagttccactttaaattcccaaggttaggtctcaaagtgcaactttgaaaatttcaggatttatttcaaacagaagtaagtttcttatctactccctggccacacaaagcatcctctctcctttggtgtttgctaattttctttcttacgtagtcacccattgttcccttcccaaatcccaattctcagacaaggttttccccaggatgtcaatggtaatacaaagtagatctatgaggacatctagtggatcaatgtggaagagcagctagttcatgggcagttggaactagcctttctccaaaaggagcagaaagaggaccctgctgtctctgagaattgaaatatatgcagtgtcatttcaattcaatggcttctcatgatccacagcagatgattaggggtaggggcagtgaaagggtgagaggtcctaggagatgagcctagggtctgcagccacagctggcacaggaggactatttcagtggcagctgactgcgtctcctttttaaagccctgctgcagcttcctgagactgggagcagacaagagtgtgtctctggcaagtgtgaacaccaaagctacttgtcattccatcttagggctcttgaaacttcatgctcaattaactgccccgataggccaacttaactctaggaaagcagaaatacaaggctctagggactcagtttaccctctggttcacatcataaggttcttgttattggaccagggccatggattctatgaggttatgtggttgctaagaatttgaccctgagtctcaccttcctccgaagacctaggtcctggcagtttcacaatttgagaaaaagcttttatgtgcttttcttcaccacagtgaagtggatattcaaccaacatttccatcataacttcatagtactatttacagagacaaaatagaagtatttccctaatggacatcatcaaaactatttgtttactcttgagtgtttaaaacaaaaaggcttctcagaagtgttcttggacaacttttcctctattctcaaaggccatgatcatgagaccagaaacctgttggaaagtggctggtgaagatgcagctcagttactgctctttccttgagtcaaatggataatcagctgtcaaactcaggttctctgctggctggcctttctgagccaagcctggaatggaaggaagaattggattccatcctatcctcagcaccatctgccacctgcatcagcaaccaaattgtcagccaatttccaatgcagaatcttaatttccagggtggattggaagaggcaggaaaaagcagtactggactgaggggcccaggtggagttttccaactgctggggaaaatgttttagatttcaaatggagcaaattcaagggaagactgggatggaagaaaaaaaacatctgccattcaatcaatagatacttttcaggtcacagcctcacttttaaaatcagtcaaatgaaggagggattatttccaagcaagaaacatggagctactcttcatgggctctgcagcaactaacgttactaataaaaatatccacggaagaaaaagtccaccaggatttaaggtgaggcctttgatgtggcactgggaatcagagaatattctttcaagtcctataaatgagaaatgatgtcttcacttagcaaaattcctcccattaccttctggagtaagaagaaaggtcttccaggtggttttccaaaaacagaggagaaagaaaaagctagttaatgtcagcagcacagagcacactgagctagttgattctgcccctaatgactgtattgtggctgaggaaggcagaagtatttggcactagagttgttggttgattgacaccacattttctctccaattctgaaggaccattcaatttagtatgcagctctgcaggtatgaaagtgggccatgccctcaagccatgtttaaagggttctgtcgatgaagaaagccacagagtcgattttggcaagactgtgcattgaattgaagaaggtcatcattgtgttttgtttttaaagtgagcaatctataccctccaaacactgatgactaaccaaaatcagatgatcaacttgcctcttttgctgcaaaggaatgaggggactgaatttgaaacatcttctccaaattccagagccattggactgaactgttccacagattgggtctccttttcagtagagccttacaaacatgaataaagacccaaagctcaatgctggccttaaaagctcctcctcaatggccacatcttgttgagtaaaagggcatcctattccttgagtaagttagaggttcagacacttgtattgacttgttcagacttatacattgctcattgctgaaatggaatgttctcctccagtcagcttttctgccttaaacaggtaaagggatcttccaagatgtctgactaacattcataaagcaactgggtgtgtcctactgagtactgactaaaagaaaaactttgttgtaaagcaagggaacttcatagactgcagataataattaccactgtgcaaatacttgtctccagtaagacaattgagatacttacagtcccaaagttgagtaaccaattaattatctagcaagcacttctcatacagagaagcatgtactgcaataaatacatcactctatggaatatctctactcttatatgtaaaaatatgaatttttacatataagaatgtacatatactctgatacatcatggtacatattgtgtgtgtgtatatatatatatatatatatatgtatcacaacatgggaatatatatgtggcatatgtgtttcctttaggagaggaatccaagctcaataacaaaggagaccaagtataatttatcaaaggcaagcatgacaattaccccagctgatgaagcatctggagttatagtggtaattacttcagcctaatcagtgtcccttaaaagtcctgagacaaggccttcaagagaaacacactgttgtcaaggtcttattttcaaatagaaaaataagacagtgcccgaagctggccagagcccggggactggggtggatggatggagagcaggctccctggggactctctggctccaggctactctgtagactgcattgggggatgaaggagttggggcatgatgtcactgctacatgcaacataaataccaaaagtaaaagggaaactaaaactgtacagaaaattaaaagagtatctcttctagagaaagacagggggaactggactccgggctgctgggaacccgttttactcacaatatatcactaccagtgtgcagttaaaatagagtaggggccgtattccaaggcagcaaagagaaaaaaaataaatcaaagatatgtcaatgatttgaagtcaaagaaaattccttcaaacacatcaaactagacattacttgtccactaggagtccacactttggcaaacttttagagtctgggggaagaaatgtaaatcattagacaaggtttgttatatagaaaaagaaaatgagtaaatagtagaccctgagaacttgctcctcggccagacagctgaatttgactcttttccttgatagagagctatgaagaaatggaaagaaatgcaaacgttaaactatactatcacaggatttccagaaatggaatgtccgcacctgatatttctccggatgagatgacgtgaaatgttgaaggttactgaatgaaagtgaatgaggagctaggggtggaagtgaaaggggaaggctgggttggggaaggagggttaggaagctatgggtaagggccagtgactgtcatgagctctgccctcatgggatctaccattccagggtgaattattaatacctggactaacacgtttggacagatgagtatgtgggtcagctgtcttctccaacttagagagggaaccaagcaatgtctgttcgaaggcatgggggtccccccagtgtgttactaataatcctagtttcttctaattaaagtttctttgcaactaaaacatcttctccaatttcctcacttgcctgacctacatggggaggtttatttttaataattcattttattctaaccaccccctcacctcacacacacatctgcatcctgccctctgttctatggccttttaattagtaggagcaatattcagacaattctgattgttacatagccaaaggcctttgtgagatgaagaagctgaggttgggggaggaggcacagggatgtacagagaaggaagcgaggcccttgttacactggcttggctttgtagaggcaggccttttgcagcaattggtgcagtgcataatgggagattatatacctcactagctccaccaactttaaaggaaatgaagagaagaaaattatttcaaacaattatgggcctctctctccaggatgaagctaaagcctgctgctgtttacctgtctggaaccaaggtggaaaaataccctagaggccaaatccttatttcttatttctagggacaatttagtctgctgtgttccactatggcgtcctatgagggacattccaatgtcagagcaagagtcagagaagttctcacttcatccttccacttccactccttcctcccgagaatgctctccatccagacaccagggacatcttttaaactaagaactaatgatgacatttcctcacttaaaatcttccaaaggcttcctaatataggactaaaacccacacttcttaccacgtcccctgtctccgtctctaatctcatctcatactaccctttccccagtgccactggcctttcttccatccttcaaacaccacaaacttattcctgcctcctgaccttgacctttgctcgtctccctatctggattgggtcttggcctcaacatcacccctgactgaggccttcctgaccttccaagctataaagtagcaccactgcaggattcctcaaccctcaggcagtctcttctctcttcttagcactggctatctctgaatttatttatttacatcatcatggtttgtctccattcaccagagtaaaggattcaggagggcagggactttaccttgttgaccactccatccctgaaaccaaaaatagcagctcatccaaagaagatactcaaaaatatgtgaacggctaatcaatatgtgaatcacagtcttgctatttccttgatactctgtgggatgagggtctggcaaatatcctgtcaggggttattggcctcacctttcctccctttcccaacccctcactacaagcgtttctttacagaagtgttcacctcttgtatttgttgttctctcttatttccctcaaccctcagactgctgtgctccttctgattgaaatgattcaggagatgtctggtcaactcatccgtgctgctgtgtccacaaccaactaagcatggctgggatggactgcctggtgaagaaggtctttggattcatggggtctgtgggggttgaatggggagtgaggttcattctaggccttgttctctcttagatgctcttctcggtaggttgtcagaatcggggaattcttgtcccaagaaattagaggctcttgttttgagatatcaataaatactcatctcgataagagtctgggggaaggggaccagctgtattaagtcagtggaaacagggggaggaaacccatggtcctaagctgccccaccctgaggggatttctgcagaaacttctctagaccaagagtgcaccccaagggaattttccccatgggttgaggaacttctttaccctccagcagagtgatatttatagatgactggttctacattttctgtaccccactctaggagtacaatgaaaaaggtccttccttcagtggcatactttaggaatggtgctcttctgtctggcttctgcttgtgaacaaggattttatggggtactctttcataattgttcttactcatcagacccaagactgcccacattgcctttcccttctgcaaaaaaatgttagagcacccagagaatcaatagaggccttcaggtgtgcccaaatccctgtatgttggctgtgtgactgtcagcaatctcatcctctcaaacttggaagcttagtttcctctttttgtaaaatgggattaataacacccctgccaattacatggggttagggtgagaatcaaagcaatgattataaggagcttttaaaagactaactcaccataggaaggatggcatcattttttgtttgtttttcaagggttgagaacaatttctattaggcaatacagcataattactgcaaaaggcacaaccttctcaaagcaaagaccacttaagtcatggtatctcaggagctcacaattccacgttctggactcactatatctttctcaagaggccccagtggcaaactgctttagaagggacttgagacagaatatgccagaaacaactgagcccagtctagtctaccccaaagagcgatgatgcttgaggtcgacctttggacgatggcaactgaagccctttggcagtggaaagttcttttcttgggggcagtctgaaggtatcacagttgccaactctggcctgtggtattaaaactagcaggaattccaaatggaaagagtcaactcccattttggagaccaagtcctcagatttagtttctctctcaaccctatatactcagggacccccaatccactggaaatcacgatacaaaaacactttgtgctctgtggctttagttctcctccttattatacatcatacttgtctctgttagactggacacatctactgaggcacctctagagtaaagaagcagggactaggcacaggtttcattcctaggtgttgatggtggtgatttttcatcctctgctctaacaaagcaaggacaggtatttatttcatatttctttaaactgctgggtgaaacataaacatactcaagaaaactctcgatgtttagtgtttctctaataagaaaagggaaggaaaaggaatttggggaataggaatgagaaagggaggggacagggagagaaacactacttacgccgtttgcagccacatttttttattcttttgggatctgtgatgtcatcatgacaggccttgcagtaaaaaaatgccctggagaaagagaatggaaaaactgacacgtttcataatccacccaaatgaaatgagtaccacatttcctccacggtggtgccaaattaatgaaacacgccagcattaatttcctttaatcttttgaaaggtttagacatttgcagacggaaatgtttgttgcaagaccatttatttcaaacacaggattctgtgatttgagttagtgctccttttcataaacttccatttacaaagaaactgggaaaaaagttgctgatgtgacacactgtgtctgctcattcgtctttcatttttgagaacagcctttgatgctactcgtggggacatgtgggcaatgagccctgggcccttggtggggaagttaaatacaacaccaaaattcccacagtctggtcaaatatatatttgagggggcagaagtatgtcgtttctcagtcaaataaaaatatcaagcttgtcactctgaaagcaccttttctgggcagccaaagggagacagagttgaggaggtctgcagagagggaaaaacgaaagccacgagtcagtgggttcctctgtcaaaccccctctggagtttcacagcttattttactccaaagctgactggaccaattcccatgctatccagccctgagaacatgcactaaatgatggttttcttctcactatggagcaaagctcagctgaccactggaagggggtgagtagagcttattgaagcaataggtaggtagaaggagaatgagatgaagcactcaaaaagaaaatcccctaatctgacttgaatgtccataggtgattccacagtgcattagctgtgtcaaagatattctggataagaaaaataagatcattcaagcactatttgaaatcacagtgcctagaacagcacaagaggcctgtgccctttcagtactggggaggtgataaaattcactggaacaaccctacaaccttctggatccaagaactaacaaaatccctggcttgttgcctttaccactcccaacaggaaactgaatgccagctatgaacatggccttttcttgaccagggctgcagaaataaacacaattcttgaccatttgattcttaggttcctttttatgttttcacaggacttgatttataattggcactcattggaaaccaatgttaagacttttggatccacacgaggtcttggagatcctgcagcctaaatctctgggactcagtgtcctcatctgtaaactgaggaggttgtcgtggactgcccagtcattccatgctgggattcagccagccccaggacttctgaatccaagtccaatgcttgctctatcctagcaaattctccactctttctttaaatgccagctgtcatctatgtctcaaaaaaattaaaaaaaaaataaaaagaaatcctagctgactgttgaccctgagtggcaatgtggctaagaacccaatcaatctgccttggcacaggaagaacaggaaagtagaaagcatccaagttggggaaagtaactctgcgtccacttcctttggccattttccctccccctttgttgctcttaacacataatgataataacggtaacaatcatatagctaacatctatagagaacagactacatgtcaggtgtggttctaagtattttataagcattaaacatatttgatcctcaaacaaccctttgaaggaggtatgattattatttctattttacagataaggaaactgaagcacagagaagttaagtgacctgcccaaggccacacagctaaaagtaccaaagctgagattgaattcacatagcctggcaccagagcccaaggtctatactaaagagatgatgacatgataataagcctgaatagacttgtgaaaagataaagtttgattacttcatgaactaaagttggattcttttttaatttaatttttatttttaattgacaaataataattgtattatatgtgtggtatgcaacacattgaaatacatatacaatgtggaatagttgaatcaagctaattaacatatacattatacagataaagaaactgaagcacaccttttgtggtacgaacacttaaaatctactgtcttggctgggtgtggcggctgacgcctgtaatccaacactttgggaggctgatgtggatagatcacgaggccaggagtttgagaccagcctggccaacatggtgaaaccctgtctctactaaaaataaaaaaattagccagtcatggtggcatgcacctgtaatcccagctccttgggaggctgaggcaggagaatcgcttgaatccaggaggtggaggttgcagtgagccgagattgtgccactgcactccagcctgggagcctgggcaatagagcaagacattgtctcaaaaaaaaaaaaaaaaaaatctgtctttgcaattttctggtatataattcatttttaactatagtcaccacattgaacaatagatttcttgaacttattccacctgtctaactgaaatttcatgttttagatggacatctccccaatccctcccaaccccagcccctgttaaccaccattccactttctgcttctatgagtttaacttttgtaggttccacatgtaaataagaacatgcgatgtttgcctggcttatttcactaagcataatgtcctccaaggctaggcaattaaggttaataagtgaaatgaggcaagggtcgggggtgtccatggtgatctggagcaggcagagtatctaagctcagctgacctctgccaagtggcatttctttgcaagaatcattctcttccccacccatctttgcctctgtcatgctcacctcgcaaagcccctcccttactgcacacctgcacctgagcaacggagtttcgctgggaaagaaaacatgctgacctcactttaaacccacaaccatggatttcaggggccttttccactctttgggatctaccccattctcctgttgcttgctttctcacactccaaaacagctctctctcctctcctctccacttgctccagctcaccgtacccctcccacaagcagccttcagctggtgatcttgcttcacccatcatcagaccagctttgtgtcctgcaaggctggcctgtatggtctccttgtcctctggtttcctggcctgcgtgtccagtggaaggagtcagcaggagactagggtgaggggggatgaggtcaccaccttgaccccccgggtgccctcctgtacaggtctatgaaatggcacacgacagcctctctctccagctcctgatagccctccttccccttgaccccacagatctagggtgaaggtggcttcccctttcttgctagctctgcagtgcttggccatcccttgttggttttcctttactatttgcccataactttacagtctcttcataaaactctcctcctttttcccatttaagtttgtcatctgtttcttgccaggacaagaaacagcacccacatttacatattcatctccaattcacacttatccccagaactccagactctaagatccaaccgccttatgatatcactgtgtgtatgtttagtacacatctcctacctaacatagcccagatagaatgcttaacttcctactacccaaaacttgctccttctctagtatccctcatcttggttaagatcaacacaatctaagccctgactctagccttcatccttcattcctcttttttcctcacttctgcccaattcattggggggttctgcacactctcccaaatacagtctgaatgggaacccacctctctccacctccactcaggggtcagtccaagctgccatcatctctcacctaaactatgcaataggcgctgagtctctcacctcttctcctgccccattcctctcattctctacaatgcaggaagaatgaccttttcaaaatatacatcagatcagcttaaagccatcaatgacttccattttataacagatccaacctttctataaagtgctttaggagccagcctctgcctctctctaacctcatctcataccactctccccaaatctattccctagccgcactttccttcttggggtccctatccacaatgaacttcttcccagcccatctcttcttcctatctgatccctgcctgatggattatttcccttcatctcaatctctgctcaaataccaacccctctgagaagctttcacttatacccaacccaaatcagtgacccagttgcattaattcttttaccactaattattttttaaaaaactgtaattctttcctgcctagaatatgagccccacgagagttgggacttctccccattgttcatttttcaccactgtttccctggtgccttgtatagagccttctaaatgtaaacgacttatacacatttgatgggcgaatgaatgagtgagtttgagactgcttcccggtattgttgggtctgccaatttttcaggagaaatgagtaataaggatttttatataaaagctcgtaacttttttcaccttggcaactcatttgtattttaaaattgtgactcaaaaggatcatatgtgcaagccaaactgagtcactgagccaccgttttgtgactcctatattaaagtctatgttccaacgttattttaaaaggaaaatatttggtggcaaggaggaaagagcaagtacccaaatgcccatcctcaagtgaccttcttaagactgcagtgggatggtttcactcctcatttactaaaacactgcatctgaaggtttctacaagctagaattcattaacttcttttgttgcttttttgcagtggagggtgcaaactcgatacgagatcatcataatctacttttccatttttacaaagcttgtttagtttcattcaaatctccaatgtcctttctgtggttttttgcagtcttcatctatttgagatcccctaactgacagcatttgctttgacacatcacatgccatggaaaattacagcctggtgttgtagctgattgtgtcagcatgtatttgtgaataccataaagcactgaaatgagacatattgcactccctaatataggaggtaatttgttttttggacggcctgatatttgtgacattcattagtgagagatgcaataggaaatagaattacacaaatgggagtttcatgttatatttgctatctgggaggtatacgtgatatatggttctcctgtgctccccagcctcctgtacttggtgctgagatgctgtttcaagcttttgtgtctcacagtctggacaagggcacaagcttcttctccaggagacctgattggagcacagggagagggaaggttcagtcccattaatcctaatttcccttctcaggtgtacccagttctcaggatactcttgaacaaccgggagattctgtgaactgagtagggaggtatttttcccccacaactcaatcatggcaatctttccccaatttgcagaaataaatttaagttattagagcactcagtttaagaattctttttccttccaacagcccatgttttctttttcccaaaagcttctgtagccagtatggcttagtttgctagagtggatggggaggaagaggaccctaagtatccacggtcacatgtcatcgttctgtgctcagcgtatcaggcttaacctaggcaaataattaagagtgcaagctccaacttcctggctttattcctcactagcagtatggctttgggcaagttagttagccaagttgtgcctcagtttcctcatatgtaaagtgggaaagagtaatgctacctatctcatggggttgcgtgagagtttaacaagttttagatacagagaacctagtacctagaatagtgctggggtgtaataaaccctcctctgtaagaatgtggtagtattattaaatttggtagaaagagagtggattttagaaaaggaaagaccagttccactctgggctccaccacttacttatgtgcctcatggccttggacaaatcacttatctcgattttacagatgaggaaaccaaagctctgagtgtttgagaagacttaccttccagggttattttgaagagcagcaataaagaatgtagcacacctagaacaggcctggctttgactaggaactcattcaatgaagacaataggcttatataactaatgatagaccttcacaattaataatgtacttaaaatattttatgcaatattactgttgagctgaatgacctgtctgaacatttgcatcacattttctgctagtaaatttctccaagttcataagatagaatcaaatacaataatattccatgttgtgctgcaaagggccctgtgaattcctaggctgcttaaacaggtttaaggatacgaataaaaatgtcatgaaacatgtaggccagtgaaatcctgtgctgcacttacagtggcttaacaattgaagctgacaacttcagccacttacctaggaggccacaaatagaaatagagccagtttcatattccatctgaaattaatcccaaccttttgaaattctatttggcagggagagtagtagaaaactgataattctcaagtaaatttcccagataatattaagtaaagagcactagataaggagccagttgtcttgttatgttgttctgaatcatcaggaatcaggatgacctcgagcagtcattcagctctctgagcccccattttctccctcacaaaataaatgagcaggtaactaggcttcctagttctaaaattttattattctcattcaaagatgtggaattcactacatgaactggagtccgtggaagtttttcttacaccagttgatggccatagacatgttaaggagttttggggttatggaagcctgcctacttccgtgggtcaaggtgtctacagccgggccagaaagaaagccagttgaaaataaactcttaccttttaacttctttggcatcacttgcgatgaaaaatcctaaagtaccttcttggatcttaagatggtttccaggattaattaatatactgctcagtgaacaaaaacaaacagagaagatacatttgtgaggtcatgttctgaataaaaccttgaaggctacaccatactgttgtgtttatagggggcccactagtctaaagctttccccaaagattttgtccagagtccaatgtccactgccccatacatttagttggataatgccatcattaagcactactgcttacttcccaggctggcatgctcccagttgaggaaatcaaagcaaatcaaggtattagggcctgggtttatataatggagcagtctagctgccatcatgggcacatgatttgaagcaaagtccatcagaataaattccttttgaaactgctattggtggtcaacacggaagcattattggcctgatgaagctattgctacaacaattttccattaaatgacagagcattaatgggacccctatagatatacataaacatcatgtacacacaccacatattaccgcagggaatggtacaagacacccgtaaccaatgcggaagcaagctgaacgtcttcatgacattgataaggacatggaaattgattccatgtacagcctttataggaagaattggatttacccaaacagtttttttttttaagtcagcagttggatatacttaacaattccagtctgctgtttataaaaacgtacagggtgtttgaataagatgtgtgtctagcatgtcctaattgaggcaaattgagaaaacaaatgcaaacctccccttaaaaaaacttgccctgcagagaagtgggaacctaaatatacattgtcctatttcaaagtggcataaatagattagcggaccaagttgtgtttggactgacagaagagataaatgtatcctaatctaataaatggatgaaacaaacaagtttaattttctgcagatcaaaagcagaatacaagattgtctgatgcagagactgagaaaagacttcaggcttaatggatactgaattcagggattctgaataaaacaacagatacaacagaggtattccttgttctgaaaagatgttgcttaataaggtaatagatatttggaatcagtctaaaggaagttctcagctgccccaaacaatcaaaatatagaggatggtaattaacacataatcttttttcctactgataaaccattccagagaagtgttgtggtcatgaagtgatacgtctgtagtcatacaggaaggacccaggtgaacctttgttcacctggttgggagacctccgagcagatcattattgcaaaataattttttgtggtcacaagaacatctaccattacttataacaatacctgacaggaggaaactgtacttgtgtcatgactattattaacactcaataataccaaaaggctatgaagatttaactgttctgccctacaaccacaggcagcagtgagattcctcccaaatcagacagcagcagtccacactaatagcacggcctgcactgagcagcggctctccataagcacctcctaatgacccctccgccaactcttcacatgggtataacaagccctctgacttcatgcaatcacgagggtgaagtgttagagctcatacagtttagatgaatttatctttcaaagccaattcagtatgatgttttagaaaggcaggattataaattttgcacatttttttaacctcctttcctgcaaggcagtttttacatgccctggctctgcaatcagaatttgggtccaaattccaacactaccacttaatagctgtttgactttgggccagttactaaatatccctagaactcaactttcttacctacaagaggtggataatggtaacaataatctttagagaattaagagagatgatgtatagaaggctcaatgcatgtgggttattgttcctttttttaattcttgcaaaaaaaaatccaaagtgtatttcattttcaacaaagttatcacagattttctctagctgaccccatggaatataatacagtcttcttatcaaaataccttgcccattaatgagatgaaattatagggtaaagaactgtacgctacagaataatgtataaggacatacacaaaaaattccatgcactggctttgcaaatgcaggtaagcctcacacttctcatctgtaaaatgggtcctggctttgcaaatgcaggtaagcctcacacttctcatctgtaaaatgggtgaataatcgctagcttacaatgcctctaagagagttaaagtatgtactatgtgctacatgactgacacatagaaggtcttaaattcttagttgctactctcagtgagctaggtgattataaaactgagaggtaaaaaaatcctcacagcaccatcaccctccactttgtccctgctgctaataaatgacccaggaggtgccctattggcattgaaagacttttccactgactgcaaggaaatccaaagcattttatccctgcacaatatctggtgatgggctaatttagactgacttttgtctgcacagtgaagtatcctgtgttccttaaatctatggctgattgtgtaaggaatcgaaagcatctctaattacctcacagatcatgtggattccaggatgccctcttattccctgtgaacaggggtgagggggtttaaatcatccccatgtgaggtgtaaggcagaaccatttgcagatactaagctaaggctaaggcagccttctgggtgggaatctaaagaatggatccagtccttgaaataatgaaagaaagaaatctagatacataaagatgctcttggcgctgaagcaccagaaactacattactggtttttgtttttgtttttaatattttcgacattaagtcttctatacacattccaaatctagaaagtttaaataaaatgctaatccccgtcttcttcaaaatataaaaagacaaggattctggatagtgataaccttctcccccttttgcctactatctttagaattcgttattgaccttctaataggaacacataaatttttccaaggatctctgatctctttaggagagtatccaatgttaagtttgttttgttctactgactgccaaaagtctctctctctgtgcgccactctgaatcagttctctagctccaactttatataattcactagtttatcagagataaacttcaacatgtgtcatgtgaagaatcaggaaaatctctaagagaaaaagcccatatatccattaacagaattccaacaaggacatgttggcagaggtggactttccctcatttcaaggaacatataaattatcctttcttctttgaccttactggtttcaacagaaaacatccagtgacagctggaagcacggggctggtgtggtcccttgctgtctctgtttcttttgctctcagactagttttaagtctcgacttattctttgtttactcacctcctacatggagcaaatacgtattttctgtaaggaacccacagttgagtagaggggtacaaaacatgatcacattctatttacctttgagtttcctggagtagcaggcttagagccttgcacgcaacaggcacatttcaactatttgttgaatgaataaaaaaaataagtttttaaagcctcagttccataagttttcctttttttcacaaataagtggaaaggaggtcacagttttctttcaaagaacaagctacaattctcatcagtcaggccgattaaaggagtgaccacacctctgctagggctaggggattggccaatgatctagcaatctctcagatgtgttaagtatgaatatgtaaatatcccaatatgtaaacagcctgccacttgcaaagttggggcaattgatttcaacattgaaagcaaaacttcaaagagaaatatgggttcctagacataaaacacatctacgtgcaattggctagcggggctcagtcccgcagggaaatgcctctatcaggtccctccatgagaggagcaccgcgtctcaagttgtatcacatttcattgggtatctctcgctaaacactggtcaggttggaagactgcagcttgatggaggaaagtaatgcattcctttctccaccacttgtgcataactgggggacatctagttttgtcttcaatcattgtaaactttacttgtttcctgtttctgaagacaacctatgattcgtaattcaagtgaaacagatattgtttaaggaaacttctatccattatgggtaaatatgatacatatatatttctctcctctccctttcatttttggtaggtgtaatgtaccattcctcaggcaatttttaaaaaatagcatgacttatatgagaacatactttgtgcttgataacgtagtaattatatttgtgtctagcaagctaatgggacttcattaactaaagcaagcaaataagaaccatttagggtttccattcatgctatgcccagatgaatcatgccattgagaagaggcttctttgatcacacaagttcatatacaatgactctcagttggaactttgtttgaaccaatccgtgtcccctctcagagagtatgactgcatttgtagtttacaggctatgtgcaggcacagttcagagaaaccccacatctcaaatcttatcacctttctggaacttttcattttttctgggctttcaaatacatgctgctgctggagtcccacacaactagacacacacacttttactttaggataccattggagacacagttgtgtatttcatatgtcaatatacttaagcccagttcacttacacacagacagcatgataaagattgctcccagttggtcagactcaaatgactgccactgtggtccaccagagatactggtgaggacttactcagcctgcatccatctcagtaactttagaaatggcattttcaaatatatttcgtacatacaaaaaaatattagccatatgggatggggaacagagaggtgatctagaaaggataatgctggatatttggttctgggagcaagccaaatcattttctggtatacttaggacaagtcatgcctacatcacaacatgccttcaccacaagataaaaggactcaaaggccaaaagccaacagcagaggtgcaaccactgtggacctttaagatgcaaagtgttgcagtaacttcttgcagttggatcatatcaataataccaaactgacaggaagccacctctatttatacacatgtactcaaaaaaacaacagaagaatcagattttggaaaaagatacagacaaatacacacgcacagacacacacacacacacaattacaaacacaaacacatgacagtgattacaatcacagagaaaagtaacttgaaaagatgaacaagtaggcatctcaacagtatgttttcaacaatattgtcttagataacacattattgaaaagctatcctggaactattaacccaaaagtttttttttaaatgccattgatgatgatttagtcatgcttcatgcaatgtaaaacagcagcaaaacagggtgaaatcacatggtgaaaattgagaaacttcatattaagaaatatgcccaaacacactaggaaaaaaaagccatgagtctgtctcaataaacagtactaactctgtaaatcaagtgtgataatctggcaatttaatagcagtgttctaagactatactgagcactgcccaagaaataaaatattcaaaatgttatcaccaaaataaatgtaaggaaaaatagaagtgtaagggcttggtctctgttttgtggataaaaggacaggaattctgctctatagacaagaaactcgacacagggaggaggaggtcactgggaatgtggaagtggtatgtagacaaaatggcactagagtgcaatggacatcaagacacgtcaggacaatacagaaacagacacaaagggctggagagaagcatcctcctgttcaactttaatagtatttgttcccattattggtgccatgactgaaaacaggagtgtgcctttcctttcttaggtttcctgcaaagaagttagtgcgtcatccaaaagaaccaacaaatcaaacaggaacagaaataggctacttccaatttatgtactctagttggagaggggtgtgtgtgtatatatatatatatatatatatatatatatatatatatacacacacacatatataatatagatacaccagacaagggaatgagattatatatacatatatataatctctctcttcttgaattcttggcaaatggttagtcctgtggttaggagtgaagatagagggtggaggttggaagaaaagttaacgaagagtgcataccgctttcggcttctgcaaaacgacaagaaaagaatttaaaatcaaacaatttgataataaatcgactgacaccagaaggaaagaaggaataaaacctttgtttcaaatcacttgaaggatgcatgtgaaaacaaggttttttggcaaagcatgaaaacagtatcatggggtgaaaccaacaacaaaggcagttaaacacaggttaaagaaggtgggaaggagaaacaggtcctttgaattttcacacccagtcagttagaaaatgtgagagggaaagaagtgggacatgtttaaataaagaaaaacattaaaattattatctcagggaagattttaaaaaatgtgtgttttcacgtggatattgtgtttgataagtcctgtgttttctcagaggcatgatccacattccctcaaacacacctttttccacaagaaccaatgtgcttccacactgagaccaagccacatttgagaattaaagctggcaactgcacaaagaaagcccaaacaaagccaaacaagtcctttttgcccttttctgaagaaaaaaaaaatatatatatatatatatatactaaaaactatatctacaaatatggctttgttgaaaacatctcagaattgtgactcaattgaagggcctatccaagaaaagtttcatcttcagggagtgctctgagttagttttcttagaatagtgacattgagttcacaatgaaccattaacagcctttcgctctttttctctccttggaaccaaaaggcaacaagtgaaagacaactgctcaaggttcagggtgcaatctcctgcagtcagattattccagaatggtcgaaaaacactatgcagcatcagcatcacccacatcatgacatttttttttgaaagatgcacaaaagtaaatagagaacactgagttacacaaagatttgcgatttcgcaacacggggaatatcatttgcaaaaatccaggatacatacagttcccctacacaggtacaagtgagtattggcaaaaacatgggtaaacagtaaccccagaaaattccacctcatctgctgaacaactaataatcaggactgtcagtttttgcaaacaatattcttcactttgccaacatgaaaaagaaaatatttatctatctacatatttgttaactgctacagccatgttctacatatggccaccaaatctaccatttttttcttccttttggttgatttgggttttcaaaatagcttaacatttgatcagattgactttgtgagcaatctgatctggtagttaaggtaacagaaaacattggattgatctgtttacaatccagtgttttcttttcttttgttttgtcttgtcatagacacagactatacacttgaaagtctggctgtattgggttattcacccagataaggaaaactccttaaatgatgataaaaggaaacgtctagtcttcccctgtactctgctcagttattaaggtgtttgttggaggggatctgcactctacatttgggcatctgcaggatcaaaaatatgaactatagaggaatagactgtgggtgtcatttcagagaacaaaagcttgagcatttctcaatgagctctctttcttccaaaactattgacaagaactggggagcaaaaaaatcatctctattttatctgtaaggtgtacagtactccatcagcaaaatttcttgttagcacgatgcttcccacctccagtgtgaactcacatattgactgggatgttatctatttcaaccagacccagtccctcatcagtctgatttgcacataattaagtgtaaaataaataaataaagagagctcctgcctctgagctccactctcctggctcatttacatgaagctgatattctgccacctggattttggttgcaccgggagaagcacatatggtacacaataggctgcttgtaatttggctatcaagagagttggtgtctcccctcacagctctaccccaaggctgctgtaaaggaggccagagtccacctgcttttttgctcacagcagtaaaaaggggttttaagttctggtttaatacttagaaggtgaaaagtccaggtcggcatgatcaggtggagatattttgaggactcatccctcttccctggagaaacactctctgaatgcccagcagggctttgggtgccaggctggtctggcatagaagctgcagtgtctgatggggcatgcctcgaaatgtgctctagggtcagagaggttttacatctggttccatgcagataaataatgcacaagaaagcagaagtgaaccgaccgttctcagaacgcactctcaccatcaaaagtgtcagctggctgctgggtcaccgcaaacttaccggctctctcggttggcagacttgtactcaatggctatcattaggagcttgagcttcacaaaacacagcctgcaatgagatggagaagcctcccaatcagttcttctgaatgaccagagccacataacacacactattacgatctttcggtctcctaatgcagtcattaccgaggggatcctcattccaccggcactgtgccaaagggagggggtggaagcaacacctccccatcttccctattaaacctgatttcttgcaagtgataaggtgctggatgctcaaagtgcaaattgcactcaggtctggctgtctagacacagagcccaagcaggaatttgtgcctggggatttactctgggccagattcattagttactcggtcgggtagtaaaatgttaactacagggggagggaaagatttggaccagctggacctgttatttggattccgtttcggtcttttgtacaaatggctcatattgttgttccgagcagacccctgtgtgcttgcaatgatggtaataatacttggcctctgtgtaagtgcccagcacatgacgatggcattgtcactcctggctccatccaagctgtctcacctcatctgcttggtgctctcgactgcagagcagactgctttgaggctggcttgttcctgtttccatcccttcccttgtgcgttccccactctcgatcccttcttctctcttcccaacccatcctcacaggccacgtcaactctaatcttgcaagcagtgggtcttctccagctactgctaccctgtgattttctattctcaaaactctcccagcaccttgtctgtaaccaaatcactgagcctttagtcaattttacactggctgtggtcgctccctattgtttcatgtgtctgaactttgtctccttaaccagagcaacttccttaagagtcctggacttgtttggaattctccatagtgcatagtgaatagacccaccgatacagagaagctaaacaaacaaatggtttccacttactgggtttcaagtctaagaaaataacaaaaggtgcagtaaaatgtttatgcttaaagattttcagagtaagtgttatttatatggagtagaaaaatagaaaacaacctaaatgtccaataataaggccataaagtacagtgcaatatggtactagcattctaaatggcttttcaaagaatatttcaagatataagatcaataaataatatcatataaaaagacatgaacatgtaaatagaacaaatatataaaaatacatgaatatgtaaatggcacaatacagttagatgaacctatacacttacatacttacagaataaaagctcacataaacaaaataattacatacatgatgtatgacaagtgtctacaattagcattaccattttgaataatagaatattgattaactgatagactgaacaatgagttgatgcttatttatttagctccagcattgtaagggggataagatactgggtcacagtgtggggaaggcttccttgtgggtcaatttaatcccctcaatatccctaagaggaagctattaccccaattattcagacttctattgatagctccattttacacgtgatgaaaccaaggatcagaaagtccatgtaacatgcctaaggtctctagctaatacctggcaggataccctacatcttgatctccagtgaagcctattttgtattgggagagacagacaataagaaaatatacaagtgaataaacaataaattcctagatgatgacaagttctatgttgaaaataaaacaacctaagaatataaagagtaactcagaaggggtatatcatctgtgatggttcaggaggaccattctgaggatgcagggagcacaacagcatgatgagaagatatggggaaagagctttctaggaagtagaaacagcaagcacagaggccctgaggcagggaagagctctgagtgtttgaggatcagcaataaattcagtaagactgcagctgagtgagcaaagtcaagcgtgacagtgattaggtcaggaaatgaggggggagcaagatcatgaggtctttgctttccagagcaaggagtctacagcttattataagtggaattgggggattttagttggtttaaaagagaaaagtgacataatcagatgtgctggatagggggatgtgttgctttcaaggaaagtgctgctgaaggcctcatgctctccagggagtgaaaccaattgctcattcctacatgtgaggttgtggtccacagcactgccttcagcagacagtcagatgtcaaaggaccacttctatccaggcatatctgggatctcctggtgatttgcaggttttctgattcctgccagcagaatctaatgacctgggctttgtgctgattatgcagcttgctgaaacaccaacacacatatccaactacagctggaaaatgccatccttaatttatgtcccaaagagcactgctaacatgcaccctttatgggactgttacttctggagcttaaattgtttttttaaaaaataagatagcttatgcaatgtttattgaaccaaattaccaaattaagtaaccactttctaatgtaaatagtagctaaatacaaaaacatcagggagaaggctgatcttaaacttagtatggatcgtgcaaaggttaatttgctaatatcctatgagcaatgaccagtccactttgggactctggtagttcatgggatcaaagatcttcattgcttttataaacctaatcccgctggtaagaagggaagtaacagttcgtagtaatggtgaattatgtcttcctagctactacagtaccatctaccaactggatataaaaagaaaagagtttcctctacaagaaagtcctaaggtctatgtggccttgtattcattccttaaccttataggggatggacccgcagatctgagtcctcttccagttttaaatccataacttcaaaacattcaaatccatacccaagctgattctacaatgccttatagaagccccttttaaaaagtcctttgacccaaaacaagctgtggcccactggccaaaggaaaggagagggatagaatgatgtgaacagagagaacataggcaagccgtgccacaacacagattttcagactcaagcccttcaagattggctgatcttgcccttcctatgcagataacaaactgagcccaaacagaggagagcaactaggtcaaggtcaattgacttttatgtaaaaagccaaaagtggaaatcgagtctttgacgcaatgtgctgcacagatgcttctcatcagaagagaggaaatgaagtggcagtcacaagcccaacaggcagacacattctgtttggtaagtacagtgttttttaaaaaactgtaaatagatgccaacaagtgaattcacatagaaactggcttttcagctttccttgcaaaatcagatagggccacattggcaccacattccacatgctaaaagggagtgcagctgtgaagcacttatccctctggatgggatgtttgttctccaatgtgccacagttcccaccactctctattgtctcagatggcctcactcttcattctttcttgctaactgcctgaaccctataggtatctaagtttttaatccctactataataggtatcctctagatattgcaaaatacaaatcaagtataatacaccatgatttacactggaagcaagagctatggctccctctgtgagtgttcaaatcacacgtttctgttagatcctgccacagagagttggccaatgtcacaatcctgggcttaaggactgcatcctgttgcagagatgcagcctctgttggaggtgtccattggggaagagcagagcaaggtgaatgaacaggggagctggtgtggtaatcacttgtttgcttatctctcccctctagactgagtttttcctgtacaggatgcatgctttgcctcactggcattttgcaaagttcaaagagtaagccttcagtaaagtctggataaataaatgcatgtatgaatggggagtagaatctcatgactggctggagggatggagaaaagataaagtggcaaactaggaaagtctatgcagagaaagcttggaagtgagtatagaatcatgaaacaagctgcttcttagcttgtcttatttgttagaagcagacagatgggaaaggaaggatacagaaggaaataaaagtagtgatatgctctgggaatctaatttttgccttcaatccacaatgccaagatgcaagtccaattctaagatacaacaatttgtccttgggaccttctagagaccctcttatacccttatgtaccccttacactcccaagaatatatatactttcagtatacccagaactgatgttctctggttaaacatttacttgcatcactcaacaccattttttggtaaagaagaatgagcattagccatctaatccttattctaattctgcctttactcaacttacagtgtttcaacatatacagaattggtgtgaaatcaggaagcagggtgaggtgaggtaaggggaaaaaaggaagtaagaaagccttcacaatgtgataaatgggataaaatcagccataagctagcaataatttaattattggtttctaaaataaaatgccccagtatgtccaacgcaggaagttgttgctggttgcaaaaataattacaggggaatagaaatgacttcttttttcaagaaaaaaaatgccacttgtcacaaaaaggtcttaagccagcaatctgcaataaaactgttataataacaagttagattgctttcttgataattattaggtaaaggtctaccaaatttgacaacgacattatacaaagcccaaccccccttttttttttttactgccaacatcatctgttaactacagtagtttcaacccagatgttcctgaacaaaggctcttaagaattagagtccaactgtttctgcctacccagagggaaatacattgttcctgccattaaatcagccccctttactggaaacattacttgctggtgttaattaaacatggaaacctgtcatagagtttgcaccttcaggaagaaaatacaaagaggaggtttggggctgttgaagaggactcaccccacaagtcaggtgagggaggatgaaagaagcaactgtcatcattccccctgaacccaaccccacccaaagcaccagcccctcttcagctatccagagggcccctgggaatgtcaggttggcacatgcaattgaagtagatacggatacaaacactgcacattgggaaacaaggtcttctggatcgaggggctggaatggaaaagattcacattcaggagctttaatttaaaatgacagccgctagaaatcgaaatatccaggtaaagaaactttgaaacatccggatttccaagactcagcaccaagaaaagagaagtgatttaaaatgttcatggaaatgttaagactctttttctctatgaagctttgataggagtggagtgggaaggtttcagaatatccccaccctctctcccactctcttattctctccttctctctctctctttcacacacacacacaaacacactcacacacacacaatctccactagcacacctaagacactagaatttataaatacattacttgatacagacaattaacttttgcctaaagtgtgaacaactgcatttttagagagccttgctattattattaatgagaaacataatatgaaagaaaaaaccatgtgtttgctacaagaacccagtgttgagtcaaagcccaagcgtccaccccatttccaacaggactccttccctgacccttctgtagagaattctggacccaccactgcctcagtagcctgttattgaggatttcaatagactttagggtcaacggtttattcactagctcatagaaggtcacctcttgggtctctgtagtagaaataaccaccaatactgtattcacatctctattcatatatgttcaaccctaattacaatactccccaatcaagtggatgaatagagccagttctgtgaggggaaaatattttttaaaaaatgagatctgccaggtgcggtggctcacgcctgtaatcccagcactttgggaggccaaggtgggtggatcgcctgagctcaggagttcaagaccacccagggcaacatggtgaaaccccgtatctactaaaaatacaaaaaaattaaccggttgtggtggcacacgtctctagtcccagctacttgggaggctgaggcaggagaatctcttgagccccagaggacaaggttgccgtgagctaagatcacaccactgcactcgagcttgggctacagagtgagactccatctcaaaaaaaaaaaaaaaaaaagagagagatctgagcctctccataaattcacttaaaatgctcatttttgcagccaggctaaagaaatctatcatataacaattgggtctgcctggtttctgctccatgttcaaatttggatgtctttctccaaaaactaatgatttcacagaactgaagttaaactagctacagttttcactgggcaagaggcccagctttcgccgggcggtcttaaattttaaatttccccaagcggcttctttttaaagatctgtctgtgcaaaataacacaggttgagagcatgattttctgaatttaggaggggagcactgaatgcagggaggtagaggagggaaaagagaatccccctgcactcttaaaccagcacagtagcatccatacttgcccctgggcttggggacagaactcctgcccttcagcacagctgaggaagatctgattggagttccccaagttccccaggcattaaatactccacatcaaacctgaattttaactgctccatcagctgcagagggacagagagagacacataccatattttaaatacatcttttgtcctaatcccctctgagctgtaaaacctgatacaattaagcttttatattttgcaaatgatgaatgactgactaataggttcccggtgagattcagaacctagaacacagtgttcttgaggcagcccaactgctgaacccatggtttcctgcagctcctccttgtccagcccctcccctcccctctgccctccctgggggtaggggagtgcaccctcgctttcgcaagtgctcaccaaaaacactgttatcagtttcccccaaaaaaatcacaagtcaaaataaatctgatgcatctctttgtctcatctaaagaggaaagcaatttgctgtaactggaaaatctcggagacctaggtgttgagagagctccctatggtaccaggtggcgcagcctccagattccctaccacttagaatgtcctcttccttctttatcccccatctgaatcaaaactcccgacaagacacagctcaaatgtcatctcttccaggaagaacccccatgtccccccagcctacagggagatgtccctataactctcagcatctctattccagctgtgtgcatctaccacagcacttatcagtgggtgtctagatctctctgacgatgggtactatttcccttagccagacagtaaactctggaggcagccaccctagggaaactgaatattttacttggcatttgttggcatttgtaagtattgctattaatcttttcatgcacatatatttgatcaaatctagtagcagtttcctctagaagtggcaccaagcttggcacaatggtgcacatatcccaattcattaaatatctgattaatcggtgattaaccgataagagaatttcctaaaggttaaaagtaaatataacttggatacacatatagctcgcaatgtgtttctttctttctaagtgcttctattatattcaatgagaaagataaaggtagaaggaaaaggagaggagggagaggggaaaagacattaacccgtactgacagataagtcatagcactcctatttcagagaaggagattggagtaagcatctgtgatggttaatattgagtgtcaacttgattggactgaaggatacaaagtattgttcctgggtgtatctgtgagggtgttaccaaaggagattaacatttgagtctgtggactgggagaagtagatccaccctcactctggatgggcacaatctaatcagcggccagcatggctaggataatgcaggcagaagaaagtggaaggactagacttgtgaagtcttccagccttcatctttctcctgcgctggatgcttcctgcccttgaacatcacactccaagttcctcagcttttggactcttggacttacaccagtgatttgccaggggctcttgggcctttggccacagactgaaggctacactgagaatctcttggcttgaaattgatagagatagctttcggggtggcaggaccttctgcccccactgcctcttttgctctccttcctgttctcttgggaaacaatctcaaatttcacccctacatcctgctcccatatcttttcatagaatgactcccctagcttctgagaaaactccaagctctcccaatcccaccctgcaagggagcattttgccagcctagagaaaaagcacatttatttctttccatgctttaagatgttattggctgcatattgttttagcgcagcgcataattacagaaactgctctgaaaatctgtatattttatctgtgctttatgatacccagaatattccccaattctttttcttcttcgtgaaccagcttaaaatatattttggcatcctttatgtcattttgaaattgaatagccaattcttactgtaatgaaaatacttatgtgccagcccagtgatatacaacactacactctaattacggctgtgctttaattaacctgaattgaagagtgttatcattaaactgctggtaactttgagttatggcttttctttaatttaaagtagaaaacacagataattaagcctccagataatcaaatgcttgaggagagcttcaatgttttgggatgttcctaaatctcattaaatgtccttcttttattgatcatttctacctctgctgtatcattgtattaaacgaataatagcactaagttgtacacattctcactcacatcagaagtggaatatatatatattccagaaactttactgagcaaatactaaattatctgacaacaatttgtctccttcttgggacatgttctaaatacaaaaatcaatcaaagggaatattcacagagccactagtgccagctcttgagctggctgaaggccagtgaagttccacaccacccagtgggtcagggttggcaaactcacacaaccacagggccaggcctgggatttatgtgcaaatctggcctggtttaagatatcagggaggagtaactacatgactatactaacccctttgctacatcaaactggagccagttagcattctgaggaaatgcaggtcttgcattgtcacattagattttctaaagaatccagaaatctagtttttacgtgacatactactatttggaaatatcagcaactagttgatatctacgtgagtcaaacatacctagtgactatcccagttagagcctgtagggggagcagtcctgacccttcaagttacccataagaggaacggactcagttcccaagagcagagtaagagaagggtggaaaagcaagaagggcctgggggttggggagggagcactcttgttagatacaaacaccagttaggccagggaaaccctacagccaaggaagggggcttgacggagcccctgctgacaccctcaccaacataagactcccgcaggcgctggcagctctgctatgtgctcagaccaccaccacattagacagccaaggcttcaattgcctttttataaaactagcttctgttaaaaagcctgctttcccccggggctttgtatcctaggcagaccaagctccagggagggggagatcccctgggacagcctcagtgttccaggacccaatgcctctgaatgcttaactcctctcagtggcaggaagagaaatagctctcaaagaaaggcacacatgggagtcacaatagggcatccattttcagaaaataactccttccgaatcaattacctattcacttttccagtccatttagcattaaaactttcgcttagagacagggtgagaaatttcagtaaacagccaaaccattttggattgcttagggtctgggcccagggactgacagagtgcacctgctgtgttcagtgacaggaggctccaggtaaacacgaagccaccaagcgctccgcctccctccctcctgcatacagaaagaaaaccgtgatacagaggaggccaagggcacccaggactgtcccctcctttgtggtaaagcctgatcagttttgtttcgatgtcttcagacctctcttttggtttgtatgtaggcaggaagtgcaagcaaatggcttttcttcctcagcccagtgagctcccagatacccctgtttcttcccagtgagaagaatccttgtcaaatcctttgctaaggtgtcaggagaataggcttaatgtttcaccaacctcagggagtttgtgttttcagagggcacaaagaccccgttcatcttaaactcaacatctgagattttttattattattattttagagatacaatcactgctatccaggctggaatgcagttgcgtaatcaacctcctgggcagcctcaacctcctgggctcaagcaatccttctaccccagcctctagagtagctaggaccatacgtgtgtgccaccacactcggctaattttccttattttttgtagagataaagtctcactgtgttgcccaggctagtcttgaatgcctagcctcaagtgatcctctcacctcagcttctaaaagtggtgggattgcaaacatgaggattctaagtgaggaatctgaggcactgtcatgcctcacggcagacacctggagctcttgaggtcatcccccataggtgaccatctattctacctgcagtggccatggcgggtggctttgatccatcctgctgagccagtggaaagagaagctaagacttgttattattataacatggcagttgtctatgtgggggctcaaggcctccttctgtatatttggttccacatttcctcagcaaagggtgaaaacactttgaatggctttatttcagtagcttctctgttgtctctatgatcagacttgatgggaagacagattaaaattcctttcattgaggggctggcaagatttgttttgccctcttagaatcagacaggcaggggtttatgccactcttcataaatgtgtctacatcacagaaggcatgcaggataactgtagttcataagttagcataaatgatgaattcaagtccaagactctcaggcctgtcaagaaaagtggggccagtggaaattccccaggcagaggccatgtaatgacccaccctcctattcatcacatggggccgagcacacgggataccctcggcaattgtcaagtgctccaactgtacccagcagaggtgggaggcttccttgcaaggggcacattcaatatccctgaaagccaaagagcatccagttaaaggtcacttactcacaaacagtagggaaggacagacccacgaaggcactggagagatattctgtgtacatttcatttgagactccttccaagtagtatttctgccatgtgtcttcctcaatctaaaggaaaggaacacatgcggagagtttaaaatatgacggtgggctgtaaaagggaaacctgagttacactcttaggcaaacaaatgaatgcactggttagataatggtgaccttttcagcaatcaggaacacggcctctgcacccatataaagccttcaataaccctaaactcataaagtgtgtgccctctaaaacacttttttaacctgtgtgatttctttcctttttcttttttctttttctttttttttttttttttttttttgagacagggtcttactgttgcctgggctggagtgcagtgggtcatagctcactgaagccttggacacctgcactgaagcaatcctcctgcctcagcctctggagtagctgggactataggtgtgcatcaccacacctggcaatttttttttttttaagagacagagtcttgctatgttgcccaggcttgtcttgaactcccggcctcaagtgatcctcctgctgctgcctctcaaagtcctgggattacaggtgtgagccaccgtgcacagtctttaatctgtatgacttctaatggtgcggagacatgggcactcacccacattagtgggcaaggaaattgatacaactgttttgaagagcaattttgcaattattatcaaaatttgtaaaagtacacagtcttttacactacaattccatttgaagtattcatagcaaagaaacaggaaaacagaggtaaaaaaatatacaagaacatcctttctattcatgaaaaatgggaaataaccgtaaatggcacacatacaatggaatactaagaagcaattaaaaattataatgaaaatgtatacctgttcatacagaaattctgtaaaaaggcacattataaaatagtgtacataatctgatcctatttttttagatggcctatagttatctgaatgtttgtaaagccataaaaagaatttaggaagctttatatcaaaacactaacagttgttacctctgagtggtagaatgatactttttttcctctatagattcctgtattgtctgaaggcttttataataagcatgtatatattataatgaaacagtatatttctactttgcacaaaatgacagatttttctgaccccccaaggaatatcacaaaaggtaaaatgttagtttcagagatgtcttgctccaaatttcaaaaggagtatcacaaaagtaaaatgtagtttcagagaggtcttgctccaaatttcattaaaatatgcattttttctaagtagtcaagtttagctggttttcccagcaaccctcttcatgctaggcatctctgaaaggatttcacaatgtagtgaatcttcttttttgtttttttgagacagtcttgctctgtcacccaggctggagtacagtggtgggatctcagctcactgcaatctctgccccctgggttcaagagattctattgcctcagcctcctgagtagctggaattgcaggtgtgcaccaccatgcctggctaattctttttttttttttttttttttttttttttttgagacggagtctcgctctgtcgcccaggctggagtgcagtggcgcgatctcggctcactgcaagctccgcctcccaggttcacgccattctcctgcctcagcctcccgagtagctgggactacaggcgcccgctaccacgcccggctaattttttgtatttttagtagagacggggtttcaccgtgttagccaggatggtctcgatctcctgacctcgtgatccgcccgcctcggcctcccaaagtgctgggattacaggcgtgagccaccgcgcccggccctaattcttgtatttttggtagagacagggtttcaccatgttggccagactgatctcaaactcctgacctcaagtgatctgcctgcctcggcctcccaaaatgctcccaaaatacaggcatgagccactgctaccggcttacaatggagtcagtctttagaaactggtgaattacaaggagaacgttgagccgctatgggagcttagggatctcacaggcctccctgagggaaggagggcaagctgtgtgtctttggctgcagcctctcaggcttcccttccagtgggggcatgggtaagaggaagatgagaggaagccaccccgccaacaggaagtggctctttagaacggcttgtgcttatcttgtattaaaaggcatcttgctggcagccagtcagtcagttcactgggagaaatgcaacatgtggaccagaaggagagctaggaacagtgggcaagggcacacctaccatctacttggtgacactccagcatacaaaagccagaaaaaatttagaaataaactgaaggctccctggctctgtgctctttgtctgcttttagctcagtctgggcaattagattatgtaggttaacctcattagtttgagctgcttccagcctactcccacaggttagacattagctaggcagtgctgctgggtatgagcagtttatctacaaattggccttccccagagtggggtctttaaaaaaaaaagtcactcaaccaattctattgctaaatggtatgattttaaaaattaactgcaatgtgtttagctaagcctgaactttttaatttctccaaaccataagatctcaataatttttttcgaataaaagatatgcttgacttataagcaaaggtcactaactctaactaatttgaagaaagcctaatctgccttagtaaaaaaatgttggaatatagaatatttgggaaacagtattaacataatttgttttattaatgaataggatactatatgaggtatcactaattacaaatccccatactagagccttatgggcaaatagtattcctgaagtaaaataattcagcctattcttttcatatgtgttcttttataatgtgttgtttatggtctaatttaaatacaacaactgattatcaaaaataatgaaaatacaaacctttattattgatcattggtggtattcctcaattaatatggttttaacaaggttcttttagttttggtcagaattttcatgcctttatgtcctaatgaagctattctttataccaaattttattgtaggtgaatcactaaactttttaaataagaaggaacacattttttgtaggataacaatattattcatgtttgttttgaatttagcaaaaattgttttattgagtcattcattcagcaaatattgactgcatatatttttaatcttaggatctgttctagcttctgattaaatcaaaactggtatttacttccccatatttttctctttgctagagaaagcaccagatgtatctgactatgatatacctgaccacatatatctgacttttactgatttttccatatcttttttcctgcaagtttgcctctgtggctaatcaaaatgcttgaggactgaaagtcgtataactggaaaaaagtacagaatgttctagaaaacaaaatgcctcttccacatccttgtgtagacctgcggatagtctctacacactagacctagtagcatcgaatcaactgaataaatgctggagcatttaaatccgttgccattgccatctgtttaagatttccacatctttaacactatttccatatggatagtcaatatgtttttgaggtttctggtaaaggaatttcactttaaaaagagtctaaaattgctaattgaattacactgtcatattctcaagcaatgtatgtagttggtgggaatgtaaagtggcacagccactgtggaaaacagtatggtggttcctcaaaaaattaaacatagaattaccattggattcataattccacttctaggcatatatccaaaggaactggaagaaggatctcaaagagatatttgtacactcatgctcacagcagcattagtcataatatctaagaggtggaagcaccccaagtgtccatggacagatgactagataaacaaagtgtggtaatttacaatggaatattattcagtcttaaaaaagaagaaaactctgacacatgctacaacatggatgacccttgaaggcattacgctaattgaaataacccaatcaaaaaaggacaaccgtgttatgattccacttatatgaggtacctagagtcctcaaatgcatagaaacagaaagtaggaaggtggctgccaggggttgcagggagagggaatgaggagtcatcgtttaactgagacagtgtccgttttgcaagataaaaagagttccggaagtggatggtagtgatggtcacacagtcatgtgaatgttccactgaactacatgcttaaaaatgattaagatagtaaattttgtatgtgtattttatcacaattaaaaagatttttaaaacccttatgtataacataagagcaggagaatcagtaattataattaatactgagaccatttaatccttaagtcatgccagaacaaggacacgaataggccaatcacatcagacaagtcaggagtgagaacccagagtcattacatcatagtgcatcacaaactcagcaacagaacttcagtctttatacctacccaagggctgaaattatcaccttctatcaaggtaacttttctaagtctcgagtgtggtatctttgacttactttggaaaagcaaaaacaaaagtgtacatttctcatacaatgcattcttaggacagaaaaaaaaaacagtgtaaaatacattgaatttaaatccttagccacacctgtatcccagcactttggaagctgaggcaggaagtttgaggctagatatttgagaccagcctgggcaacacagcaagaccctgtctctacaaaaaattaaaaaatttgccaagtgtggtagcacacccctgtagtgccagctactcaggaggctgaggcaggaggatagcttgagcacaggagttcaaggctgcagtgagctatgactgcgccactgcactccagcatgggcaacagagagagatcctgtctctaaaataaataaataaaaccttgtgtttaatactaagaaaatgaaagtgaacaaagaaatctggaccaggtaaagggagttattgtcattatgaattccccttttatagatgataaaactgaggcacagagaggttaagaaacctgctgacagtcacaaagtgaatccgtggtacaaacaggattcagagttcacactcttaaccacccaccacaaagatagaggtgtagggaggttgtggtgttaggatttcggggaatggggaggatttgctgtgtacaagtaccaaagagggaaatatcaaaaccgaagcccatcaaggactcaaaagcccaaactctgtagcctatgactttacgagacgtctagcaaggagtaataatccattttggctctagctgaaagggcggttcaagcctcctctcagagcataaaagtatggtttctattatacaaaatggaaacttcctagcctacaacttctttcctaaaatagtacatgctgttccccacatttgtgttgtcaatgtatttttaactgtaatgtgaagacacacttctcagcagaaaaaaatgaaggaatgggaccaaaatgacttagggaaaggtgccagaattaatttgccagccattcagcaatcagtcaaaggcagagcatttcctgaggcagcaatttatcctttggctgtcacatcaaaccccagctgttttagaagagcgcctagcaaagatgagcagatgatgctctgtgggtccttattcatcaaatacacacgggatcatcagtgagaacaggggactgagccaatgaactagcttgcctacacctctcatttactgtcttatttatctactcttcattatctaatttttcatccagtctagttgaacctcccaagcaaatggtttcacaccaatccacgggcagacagctcccccatcaaatgtaccttccaactggaaacctcagccttggctccacgggaagtcacaccttcctgatcccaggttctgtgtgtgtcactaatggtgggttggtaatgatgccttttattttttatgcttcctctgattagagtgaaactgtgtttctctaatgctaacagcccagtgaatgtgaaaaattcaactctcctggctgggagtatgttacagccatcatgatttctgttcccagtaaaaagtctgaataactgtgttgattacagccaaataatcttgcaaaagtccacctctacccgtgaagtcatgtaaataattccaaagattgtcatatactagtccttatttaattgaaaacaggcaaattcttttaatccaaatatacattatattatgcacatcaaaaataaagcactaaaaggaaattataaaaaccaatgaccattatgttaatagctgcaataagaagagatgagtcgtaacatatacacactaacactgcccaaaacaggtagtagaaggttagtgtattcacaagaacttactacatttactatttttaaaaagtctatctgaattttcagtaaatattcttcctataaaggatccacagttttaaatcttagaagtgcttaataagaattagagacatttgaatgaatatttatatatatcaattatgcaatacattgtcactgtcctttataataagattgtctgaaacagaatgcagtcatatgaactgactggcatatcttagatgccattaaaacgtatttatcatgaccccacaccccccaagaaaaccccacaaaatgtgtcaagtccttgcctacaatactaaacatgaaatcagaattgatgggctctaagttgatgaatgtttgggctggttactaaaatggatggggggtcatttgtatccattcctcaacagcatgctctgtcaaggggaaaagtttaattgaatcttgcgttttctcatttcttgctgaaaagtacgatgttaaggccagcaaggtattaagaagacttcatcatgggacttgtcagattctctcctcctctatttccctctatgttccaatgtcaacaaacttgccccagtttttatcaaagggcatgtggttatctccttctctaccccttcttagcctcttcgttcttcagtataattgcaaatcctaaaagcaattcatagaataaacaaaatgaaatgtttgagtcttgttagctgaggtccaaatggtgccagcacagagaatgcctcactgcacagctttctggggtggagttaactagtgatcaagttgaagccaaaggaagaaagcagaagagaatagtgatttgcaccttttcagaatgtatttcttctctgtgccaaactgcatctcagcgctgaacttcttggatgtggactcagttcagctgcctttctgaaagttgcttggatttcagggactccataacaatttggcattccacaattatggcctctttcagagagcattttccagaatgtgtgactaggacaaaaagatctcagatttttccaaaggcttcaggacaatgtcaattaaaacaattttggggggatttgatggaatgccagaaaactggttgcttcagccatgaacaaataaataaacaactccaaatattaatttcggaatggacttgagccaaatctcttactcccagaccagtgggctgcagactatcaaatgagatttcttccatcaggcattatgaaaaagaatcaacccacacgaggtgttcagagggcgattaaaagactacaccacatgtaaaagtaccagaatacatggtattttccctcactccattatcccaaccaggtttatttctggaaagacagagtgccagaggaactgaaggtaaaggaagggtaaacagcaagagtgatatgagaactttttaaaataataattgagaaattattttttaaagtgttacatatgtggcaggaaactggtctttttttttttttttttaacacatagaaggttttgccaccctatcctcaattttctctccaatatagaaaaggtgtttacacttaagagccttttttaaagattggcctattcactctctgttcagagaggaatttggttttgcaaccttgctaatagtaaagaacatatttacatgtccttcaaataataaggattcttaaaaataccactgaaaataattcttatttgggtaaattgagcaggaagtaaatgttttcagtcagacgtctgccaaaccaaccccagaatagttcagcttcgtatgcagggttttcaggacagcccttcttaccccatctgaggtgagggaccagggtttagcttttatttctaatatccattcttttgcaaaatctaataaaaatgaattacaggccaggcactggctcacgcctgtaatcccagcaatttgagaggccaaggcaggaggatcgtttgagcccaggagtactagacctgtctggacaacatgatgagacaataaataaataaataaataaataagaattacaaaaaaatgaaaagacaaatccaatgcaaggtacaaatccaaaatttttatcatagattcacaatccatataaaattaatccatccaattgctttgaaagtttctaagcacttactctcatcttctgtacttaactcgtcacggatgagtatcaaacagctcacagtccccatctatggaccatggaccacacttggaattgtgctggtccacaacatggcaccactctgtcttaaaaatctgacttcccataatttcccctgcttcagaaaagcagaattgttctcaactaatacttcacagaaagaacttgacaaaacttaatagcaggtgttatctgaaacaaaggagaatggggaggggattctgtggtggcccctactagaatgtgggaaatgttgaaggcacagatttttacctgaatctccactgcctggaactgtgcgtggtacatagtcatagctcaataatagtttctgaatgaatgaaataaacttgggaagcacagaatttaacaaagccaacttgttttatttaattttattattttactttcagcacaatactccttagagtatttaacatgttaagaggaattgtaaatctccaagaggagaacatgacttttttgtttttttgagatggagtctcgctctgtcacccaggctggagtgcagtggtgcaatcttggctcactgcaagctccccctcgcgggttcatgccattctcccacctcagcctcctgactagctgggactacaagcgcctgccaccacgcccggttaattttgtttttgtatttttagtagagatggggtttcactgtgttagccaagatggtctcgatctcctgacctggagatccacccgcctcggcctcccaaagtgctgagattacagacgtgagccaccgcgcccggccagaacgtgatatttagtcacagaatcctttatttcaaggagcagcttaagaagatgggaaatgctaatctaaaaacttcctctcctgacttcccaccctgaaatctctgtttcccttgacgcttctatcacaaatatgtctctctatgacctttttcagttgtcaaaatccagtgcttcctgtaactttcaagtcataaactacctcctctctgaggcctttcctcatttcaccaatgtgctgtgctgtccctgccttaatgggaatagtaactgcacacatctctcaggaggccatgtgggctgaatgagatgatcagtacagaatgtctagaacagtacctggtacttagtaagtgctccatgtgtggtgattagcattaagtaccatcacagcatttgacttctctgacatctgaagagaactacaatgaggtggaattccatttccgtatcgactgtaagctccttaaaggaagagctgtcttactcagctctgtatcttctagaaggagcagcacagtactttgcaaataagaggtgctgggttaatatctgctgagttgaactaagcaagataaaactggagagagaggcctaaagaaacaagaacaatttttctaggcatctgatcataagtaagcatgaataacttcaataacttcatagcgtttagtgttggggcatgaaataaatcaattctgcttctgagcatggaaaaaatttctgcactgttaggatctaccagggagtatgtataactgggtcatttttacacttcccaaaaaacttcttactatgagcaatattttctgggaaatttttcattacagaacatcttgggcttcttagcaactgacttacggttttctaaattctaaatccgataacttggaggcttgaatttgaaagacaaaactctcaagaactgatatattgccaccaatctaactggagttattcctactagctagaagtcctgcctgcattcctctgggagaggaagccccgtccctccccatctcatgcctattctatcttccccatgtgactcagccctccttgtcttctccttgtcttcattttttggattccaaagtaaagtcaaacaacaattcaacaggaagtagactgagcccagggaaggtgatatttggcaagttcattattcctaaattctaaaattgaggccaaaacaacttgatcttttctaaaaaaaaaaaataaaaaaacaaaaaaacaaaaaaaaaactgggagaagaggaagggagttagaaagaacatttgaatccacataggaatggggagcttgcttttgataacacaaaaaactagagagttgcctgtgcctttgaaggatctttactattttagacagtttggtgagaatcccaccagccactgctgttagcaaatgacaaggtctcaccagtggatgtgtctgagggcttacttagtaaaagtcctttgaaatatggagtccagtgctatctatactttgatatgcacgtatgtcacccaagtgtcttggcaaaatccagtttctcatgccttagtcctgaggtggggtcaagtctatgagtctgcatttctaacaagctcgcagatgacactgatgcttcccctatagggcccacattttgagtagcaaggagctgttcccaaagacggtgaagaataaggggcaagtattctccatgatgccttgaggacaagagattcagaagaatcgattacagcctaaaggatttgaaccagagatgaaaaagaatgctttccatgaagtattgctagatattggagccagttacagagaaagcttttagacaattaagcacaagatgggtatccaagtgtttgggctgttgtgataattagcctaaacaatatttcaggggtccagatttatctacttagtctctctccattgattcagtgaccccagtaatagctgaatctccattggaatgtgggttgtgtagatacagaagcaatatcatgactatattgaattcaattaaaaataaagtttcagaaaatggccctgatttgcatccctaatttctattcaactttcccattttaggacacagtattgagtgtgaggacgaaaacgctcgccaacccagtcctgttttagtgacagcagattctgggtacttatgtctcctatcgccatacaatatggcctaataaagtcgcgccaaagagactagatttcatttcagagcaaagggttcagtcgtaaactttagctttctggctgaacagagccattccagccgcaagcataaattctgctagttttaggtatcagagtgattgggaagccaaatgggttatttgtgagcctggtagcaaaggcagaagcgccagctttattgtgtattcattgttatctggacaatctcttgtcagttagagaatattttcacaggaagttagaagcgatttcagaaattcccctctgcagtttctcagagtggatgttaggcctcatcaaaaagacatttggttcagagattgaaagtgggcagcctataaattgctgaggtatttagctgggcttagcagttttcctttgaggaggaaaccatgatcctgagtgctcactgagtacagcagggaagtgcctaagttcacgcagcctctggcttcaaaaaatcccagccttatcatgtgctcctgagccaaggagcataacctctccaagccttaattcccttcacctgcaaaatgagagcaacactagtacctacctcctagggaggcagctgaaatgaggtggtgcatgtaaagtgcttagcagggtgcctggcaaatagctaacatttgtggagtactttctatgcaacagatgagcatgtgttctaaccatactaagagatggcatttattgagtttgtaccttgtagacagtctatacatgtcagctgtcattataagtaatgagtgatagtgatagtgatgatgctgatgatgctgatgatagacaagatagctctactgctcagacaaaggaactatgccaattagatgtggggcctgtgattcatggcttcctattgcttagctgctgctagaaaaggctggaacatcagtgatcatacagtggttctctgaattgaagagaaacattaagcagcctgagtttgtccccaaaagacagcaatattctctggaggtcctctctgccacccatggactttcctaacggccagtaagttaactctgggtagatatgatgataagggagaagttgatattttgaggggacatgatggtctcccaaaatagaaaatggatcatgtgtgggtagcaccattaacatgatgcaggatcacccagcctggctttctgaaaggagccctgggcaaacaggaccctgatgaccagaatgacacttgcccacatctctcagttagtactccccacacactattcgtacctgtcgttctccttcctatcaaatggctttgctactcacttccagccttgcctccacgactgattttgaatggatacctagcatatccttggtccacaggatgagtgtgcaaaaaaaaaaaaagggtacttattcaaaatattctttttaaaaatacttgtccagcttgtatttggaggacagacagagcagtagatggggtgatagagagaggaatgatccctggtcagagtcttcagctactgaccctagtaattcaatcttgagcccaattttgcatactcagcaaaagaaaagttttgcagtcaagcagacccatgctttttagaaagcaagttataaaatatctgtcattacttgaacatgccatttgggaggaggagactcatccctcctagccgaaaaaccgtatcaaagtattcccccaaataccttattaaagtattcaaagtaatctcaaactttctgcctcctgagaagagttctgggaagcacacttttctatttcttgttgcatttctagaatgttttaccactcattgtagttcagcatccccagaaaactgacaggcaggccatcaccctgcagttggtataagatggaaagagggagaggacttgctatgatcctgtttgggcaaagagacccctccctgtccccatgctcacctgtcccatgagcaagttcaagtcaataatacatgtctatccactgaggtaactcattgcagcacacagctgttctccttgcagtcaacaccagtgcagagctctccctgggcaaagctgcacttgctggatgggttttcattaacatatgggaaagaatagtcagcaaatcttcactgttgcagaggactgggaaaaaccagacagatgcacctagttctcacctatccatgcagacaaaatcatctagccttagggagtggagggtgaattgccagagacgctgaaggggttgggaaaaccagtgtcatttaggttgatgaacaatgctgctgccctaaaaaatgtattcagtcagaaaattctgctgactccgtatctcaccacaaagagctccagggaccttccccgacatcagtcatttacaaaagtgttggcaacacaaaattgtaagcactgtaggtagggatgcctttatgccaccttagagggtggttttatatcaggattattcctctatcttctcccatcagtgatccagttctgacccagtctcaaatctcatcacaaatagaaagccaaacagcacctacctccatctcttaagaaagttgaaggagagaatttatagactgaggggtaggtgctttcatatacggataatctttcaaaaataccataagctcttccattttttttacagcaggtaaatagggagctaagagaggttcagtagccttccccaggtcttacagcaaatcgcgtcctaatcagagtcttataatccttgccctgtcccatcctgctgcccactgcacagccgcacaacccccctcacacttcacaaaccagggataacaggaagggtgagggctgtggtagcaattttggataatatagtggtccatgggtacttatagcagggaaatactatctgagatcttcagatgatcaaaattgaatcctagttagactggaatacccaatcccattctgaaggggaatcaaatattcctctttcagttgttcttgcctctctagcctatttaaggagaaagagaaaaaaaatactcaaccacagatagaaatgtccttctcattgccaaattttagccaaaacaagaaatcaacagaagcttcttaagaaactatacctatttgtcccagtctagaaaaaggagaaaggatagaatccatcaccctaaaaagcaatgccacaggtatgggggccaggaataaacagacttccacagccagactgacaacaaagagcttctgcacaccagcatcagtgggcacagagatatatgttacttctcagtgggcagagataccctatctacttacagggtatggaaaaaagagaggaagtgatgactcttattcatagatattaattagttacatccacttcccatcctccagtgtatacagagtacagccatcaagacaggacccctgtatttctccgaacatgaaaccctaatcactgggactgcatcactcgttaccatgaaatacatgtggcagttaatgataaaaaccacaaaaattacactcagttcaaacgttttattgcatgccattcttcaagatggcagatggctgcctaaattgatctcagtgtcatgttacaggtgcccctaagtttctctaaatcagccaaatgagtttgaagttgaaacggccacctcacattgttctaccaggagacgcacaggatgccactgtaatgcagtttgctgaattatagtattcataggctctgattaaaaaaaaaataggtgaactacctgaaacttgccccacagagaatgattattgaatatgctaaaaagccatgatgctgatgaccctgacttaaaggcaatattctccccattctggctgtacagggcaaacatagcatatggcggctaaagagatatctgagttactggttctgggtaagatggagttatcacagttcatcctgtctttcccactgaatgatgttctaagacctggacagaatgcatggagcagctatttgaagacattgagaataaacaatggcaggtagattgaagaagacccgaattagaaataccaccaaatcagcagtgaatttaccattgttctcttctggtatcctctagcctgacctcgaggcagccagaacctggaagggatcatcaagatgtggacaaaaaacctccaggagaagcctcatagtagaactaactaatgcgaggtaactcttagaaaaaatggaggaaatcactgtttttccctccctccctccctccatccattccttcctccctctcttccttcctctctttcttctttcctttcttcctttctttttctctcctcctgtgccccaacaccaagccatctagtagtggcagtagcagtggtgacaatgcaagccagaaaaagattaaaggagataggagaattttcctctctgcccaaaaaacctatggtcctgagagaatgaaaaccaaaccctattgctttttgtctctctctgcccttctaccagttggccccagatgtgaacacaatcacagaaagtatacagaaagccagataactaaagcctcagcagcccttccatcaaaagatcaaaaaggaagaccccagggaacctgaaaatattgcagagatcacatagaaagaggacatggggaagtagtcactaaattgtttataaactctggggctcacgctaagctgtgcatggatgaaactgaccctacacagcacatttagattctaagaactaaactacaatatagaccaccacccagtctgagggcaatattggacagatccaaatagcactgccaacgctttgaaaactcaactaacattgaagtcacaacccatagaagccccataagaacctgtagcctaaaatcaagccgatcaggccgggcgcagtgcctcgtgtctgtaattccagtatttgggaagccaaggcgagtggatcacctgaagccaagagttcaagaccagcctggccaacatggcaaaaccctgtttctactaaaaatacaaaaattagccaggcgtggtggtgggcacctgtaatcccagctacttgggaggctgaggcaggaaaattgcttgaacccagaaggcagaagttgtagtgagctgagattgcaccactgcactccagcttgggtgacagagtgagactccatctcaaataataataataataacaataataataataaagtaaaataaaataaagcaggtcattaccttccaaaataaaattatcaacattcttacaaaatttaaacaagaatcagagtttcataataaaaaaattaaaatatccaagacacaataaaaaattacttgccataagagtaaccaggaaaatctcaacttgcatggaaaaagacaatcagcagatgccaatgcctagatgacacagatgttggaataatctgacaaaaaccttaaagcaactactatttcccgataactaagaaagaacacatttgtaaagaagtaaaagacgggatgcataatttaaaaatcaaaattttaaaaatcaaatggaaatactacaattaaaaaatacaataactaaaacattcactgaatgggctcaacagcagagcaaagatgatggagggaagagtcaatgaacttgaagctaggtcaatataaattgtgcaatttgaacaacagagagaaaaaagtattgaaaagtttcacacagagcctcagggtcctctgatacatcagaaaaagatttagcatttgcatcataggaatcctagaaggaaagcagaaataatatggtgcaggaaaaaaaaatttttttgaggaaacaataagtgaaaacttctttaacttccccagagacaaacctagcagttgaagaatctcaatgaactccaacaggataaacccaaaagaataatgcctagacacattgtaagcaaacaacagaaaactaaagacaaagagaaaatctagaaggcaatcggagaaaaatgactcattacttataggtaaccacaattcaaatgactatggatttctcatcagaaacaatggaggcaagaagaaagtagaacaacacttttaaaatgttgaaccctgaattctatatccaccaaaatgtccctaagtaatgaaagtgaaataaagatattttcagatgacagaaaacagtgtttgttgccagagcatggctctgaaggaactgctaacataagttggacaaacagaacaggaatgatactaaaaggaaggaaacaaagagaaaacaacaacattaataaatattagaataatataatagactatacttctcttgaattctttaaaatagataaaagcaaaaattataacattgtctgatatagtttgcaacagctgtaatacataatacaactataacataaaatggggagggtaaagaaacctatagtttggtaagggttctacatttcacttaaagaggcaaatcatggaatccaagtagacttaaaaagttaagtatgtacattacaaacccatgagcaatcaattttttaaaaactatataaagaagtataagaaataccacagaccaaaaaaaattctgaaaatgttcaaaatgattcaaaagaagaaagaagagagttcaaagtttttgaaaaattagtctaattttcaaaactgaaacaggaaacaaacagaaagcaaataaaatattaggcctaaatccaaacatataaataataatattatagataaattgtctaatgcaaccaattaagaaagagagattcaaagaatcgatttttaaaaaatcacccgactataaactgtctataagaagatcacttaagttttaaagataggtttggttcaaacaaaaaagaggagaaaagatatacttttttccatgaaaacaccaatcaaaaaagaaagcttgagtggctatattaatatcagataaagtagacttcagaacaaagaaaattacaaggatatagggataatatataatgataaaaaggtcaattcaccaagaaaacgtaacaatctaaagtatatgcacttaacagactttcaaacacacacaaagcaaaacctgacggaactaaagtagacaaatccacagttataattggagacttcagcatccttctcgtagtaagatgcagaactagcagacaggaaatcagcaagggtatagaagaaatgaacaacaccattagccgactagtaataattgacatttatagaacactctgcccaacaatagcagaatatacattctttttaagctcacctggaacattcaccaagacagattacattctgggccataaaatgcaccttaacaaatttaaaagaattgaaatcatgccaagtaggttcttaaccataatggaatcagactacaaatcaataatagaaagataagaggaatatcttcaaatacttggaaattaggcaacacacttctaaataattcatggatcaaagaagtttcatgtgaaattagaaaatattgttaactgaacaaaaatgaaaacacaacatatcaaaatttgtggaatgcagctaaagcagggaccaggaagaaatatatagcacaaaatgtttacaccaaaaaagaagagtctcaaatccaaaatctaagcttcatcttaagaagaaactagagaagaggagcaaagtaaatctaaagcaagcagaaaggaaacaaacaaacaaaaaatacaggaaataataaaaccaaagccgattatttaacaaagatcagcaaactttatatctagtaagagtgacaaataagagagaagacacaaataacaaaatcaagaatgaaagagtggttatcactgcccacattaaaaggacaataatgggatactatgaataactctacatacataaattgaaaaactcagataaattagaccaatttttcaaaaactttgaattgtcacaactcacccaagattaactatttaacctgaatagtcctataaccattgaagacattgaatttgtatttaaaaactttcagaaaagaaaaaaatctaggcccaaacctagtagtatttcactgccaaatactactaaatatttaaagaaaaaaaaatcaccaattctacacaatttctcccagaaaacagaaggaagggaaagatttccaactcattttataaagccaacattacctgacactaaaatcaaagacagtctaagaaacgtacaaactaatatacaccaaaaaacaaacacacacaaattcttcataaaaatattaacaaaccaaatccaccaacatgtataagaaataatcacactaactagggtctctcccaggaatgtatggtggctggttcaatattgtataatcattcaatgtaatttaccatattaacagtctaaagaagaaaaactacatgatcctatacattgatgcaggaaagcatttagcaaaattcaacctccattcatgattgaaaaaaataaaactctcaccaaaatagaaatgggaaggaactccctcaacctcaaaagaaaggtatctacaaaacatctatagttcatatcatacttaatggtgaaagaaatgaatgttttcccttgaagacaggtgacaaagaaaagatgtctactcccactccctctattcaatattctgcaagaagtgctagccggtacaatatgattgccaggtacaaggtcaatacagaaacataatgtatatttctacataccaccaatgaacaattggaacccaatttttttaagatgtcatttataatagctccaaaaatgtaaaacttacatataaatctaacaaaacatgtacagaatcttgatgctgaaaactataaaacactgggtaaaacaagttaaagatgacctaaataaatgaagagaccaaattgatggactggaagatacgacatagtaaagatgtcagtgctcccccaaattggtctataggtttaatacaattccaatcaaaacacaggaggaattttttttaggtataggcaagctgattttaaagtatatatggaaagacaaggacactagaatagccaaagcaattttgaaaaagaatacatttggaggactcaaactttgtaatgcccattttaagcaacagaagattgttcctagaccttgaagctcaatggagtttgccatattggaatctgaagttgtttggttccggtacctcctttcatccttccatattctcccttttggaatggcactgtctatagccattatcctatggctgtcctgccattgcatttggggtgcagagtacttgttttctagtttcacagatccaaaaatggagaagaattttgtcccaggattgatcacacccaaagtctcacccataactgattagatgatgacattgggacatgtgagttgctgatcttcagctctgattttggacttgaattgttttgcagggttgagacttttggggatgggggaatgaggtgaatgtattttgcatgtgggatgaatgtagatttttgcagaagtgattaacgatcttgtgataggaaggttatctaagtgggctctaaatgtaatctctattgtctttttagaggaggtttggctaaagaagaagaaataggagatgtgacaatggaagcacaatgttggagtgatgcgatgacagggacaagagccaaggaatgtggtcagcctccagaagctagaaaatgcaaggaaacagattctcctctagagcccccagaaggaaccagccccgccaccatgttgactctaactccactgaaactcagtttccaagttttggcctccagaaaaggaaggaaaaaaacttgtgatatttacagcaactaggtttgtagtaatttattgcagtagccataggaaactaatacatagagtttcatttatcttgggtagatatctaggagtggtatttctgagtcatatggtaactcaatgtttaaccttttaagaaaaactccaaatatttcaacttaaaaacttctttccaggaaagaaagtttaagttaagaaaatgaaaacacaagctacagattaggggcaaatatttacaaattgtatatccaacgagatccaaaatatataaagaattcttaaacagtaaaaaacaaattcaaagaaacaactcaattaaaatggacccagcacttcaccaaaaagcatatacagatgacaaataaccactgggaaggtgttcaacatcagtagggaaatacacgtgaaaaccacaatgagataccacactgcccacctactagactgtttaaaataaaaagtattgacaatgccaagtgatgataaggatgcggagctacagaaactcctgcattgcttgctgatgggaatgataaatggtacagtccttctggaaaacactttggcagtttcttttaaagttaaatataaacttaccctataatccagcaatcctaattcgagatacttaccctagagaaattaaaacttatatccacacaaacttccatgtaaatgtttatatcgactgtattcatgatcgccccaactggaggaaaactaaatggtgtccaatggatgaatggataaacaaactggtacctgcatataagatgtcatactattcatcaacagaaaggatggaatactgatacatgcaacaacctggatggatgtcaagggaactatgctaaatgaaaaaagccaatctcaaaaggttacatgctccatgatgcctttacatgacagacttgaaaagacaaaactgtaatgacagagaatagatcagtggttgccagggcctaggagtgacaggagggtgtgactgtacagcatgagggaatttgggggtatggaaactatcctgtatcctgattgtggtggtggttgcatgactacacatacacaaaatcaactttactgtatgttaatttaaaaaataaaatgaaaaacacttctggaaaactataatcatttccaaatcttactggaatcatgtaccttcagcattttcctataatgcaaatggattactctgctaataaccttgaggacttatcaatccaaagccccaacacctccactcgaattgcttgagttacttgaatatttttgttatgatcagaaggtgtctgtaaacattaggattaactatatttttttctccaagatacttttctttcttcatcttattagcactacctaacccgtccggatctcactcccctttacagacacatttcacacatgggaagtctatcatactgcactgtaacctactgcttccttctttcaaatggttgagactaaactttatagctttcttacatgtccctcaacaaaccagtcatcatctcccttctgtactcagttgcgtcccttggcttgagcaatacatcctcccactacaaggcattatggtctagacaagacagcacttgcctgggtcttttccagactaagctaccaccaagggaatggggcagacatatgtatctcctaccttggaaaagagcttaatttttatagtttttcatggttgaggggaaacctaggataagctcattttacaaatgttgcaaagtggtttctattcttagaagctattgatttgaatataaaacaaagcagtgtttacattcaagacatttctcttggagaagcaatgtgtaacagtggggaaagcgctgagctgagaagccaatgatgttgtagcgttctggccctagctctaccattccccaaccagccatgcaaccagaagtcatcttccgatttcctcctcccaaagagctatggtgatgggtcctgtggcttactattctacaactgaagaaaggtcagagacattaggttctttgcatttggcatgttttccatatgtatctggtttccttgtgtatctggtcaaataaagaatttaagtgaaaatgtatatctcagccaggcacggtggctcatgctgtaatcccagcactttgggaggctgaggtgggcacatcacttgaggtcaggagtttgagaccagcctgggcaacatggtgaaaccccgtctctactaaaaatacaaaaattagccgggtgtggtggctcgtgcctgcagtcccagctacttgggagactgaggcagcagaatcacttgaacctgggggctgcagcggctgggttgctgggggagaggtgggcggaggttgcagtgagccgagactgcaccaccgcactccagcctgggtgagacagcgaaatctccgtctcaaaaaaaaaaggtatatcacgtaaactgaaaagtgctgtgcaaacgtaaagtattactataattccaaagttcttaacagaatacccacggtatcaaatcaatggtgcttccttgttttgcacccctagatgtgtagaatagttgcctcaaagttccaaattcctcatcattgttctggacacagattcacacttaaaatcaccttagggcaacgacaaccaatagacttaaggaaatctgatattttattccttatggcttacataggactttgcgattttcatgtaacaatcactaacagtggatggcactcaaaaaaccaaagtcaaaaatttggaagagtggggaggcagagtagacccagtctgtggatacccaggtggactcaggaatgcatgcaattaattaaaggccaattatctctgaaagagctcagactgatgcttggccagaggcttgttcaataagatggctcttatttcacatcagtgactatatcctgccagccgagaagggccagggtgagtgtcagcttctactggattttcgcattaagtcctgaccattgccgcttctcgggccccatcctcgctgggcaccggactctgtgtatatgttatgtaatctttctgtgctgcctttctctttgttcagtccatgccaagacccatataaaagaatccatatgtgattacagctataaaaccaagaggaaaatattagatgaaaatataacattttggggtttctaagtttgctttacctttaatgctaggcagacagtttacacaaatcattttgctgcaaagtaaagaataatgagttaaatgtgttccctgtcaccatcaatcatgtacatttgcttttgattcaccaaacatataagacacatgaaatgactttctaatcatgttgggggaaggagggagaagggaagaagatggggaaaggagtttcaacttcttttattttattcagaagatccgttgacattttctggcaatctatcttctaacatgctgtatgggcttctttttgctaataatgtttgccttgagaatttgtaaaggtctgagaacgctttaattcaatgttctagaaattaccagggccataggggaaatgaatccctgttaatagctcatggattacttctctctttattagaaatagttttcacagaagttactctactttcaggtgggcattagtgggcttggtcagactgagtggcactgcgggaggcagcatcctgcatggaagcctctgatctaatgggatctaagtagggtgaaaagcgggtacacagtgacgttgacccaaataggatactggggtttagcaaattcatttcaattcatgggtgtttattttgatttgtgaacttaaacaacacactgactggattttctggcagttgaagagctttataaccaaatctaaccagcctctgcacaatccttgtcaaggattaaagagctttgcatttcatgtttctacattgaatcaaagctctttaatttggcaagggaatcatatacagtagcaaagaaagaagttttctgcaccaaaatcacaccaaattacaagtccccgctggtcctggtcccacccagctgtctgtaatacaggctggtcaggctaggctgaggccaaccgatgcattcatttactccacaaacacgtattgagtagctattatgagtcaggcgctgttctaggcactgaggattcagcaagtagccccatcttcacagtgctcaccttgtcccagggaaaagaggcaataaacaccaaagagtgccacgggaaaaaacaaagccaagagagtaaataaggatgtggatgtatggtgtgtggagggggagggggtgcagattcctaaaatgcaattctgttttttccacatggaaacttcatcccccaatgaagctgagaagaacagctgtatacttcctagagaatatgaagtgggacatctactctctctagagaccctcacaagccccagagaacttgtatgagcttagttactttcttcctgattttcctgtatttgccagggaagttgttgaatcataaagtatccctttataagaaatataccatattcatagattggagaactcagtattgtggagatgtcaattctcccaagagaatccagaaacagacccgatcatgtagtatcacctgacttatttaaaaaaaaacagggggttctgggatatttgtaatgtactctttgttaatctaggtcctggttacatgagcactgagggtataagtatttaacaggttgtacatttattacatgcacacttttattatatttcaataaaaaattcatttttaatcccttttaaaaatgcagttctaatgccttagaggaaagactcaactgagaaattaatattaagcaaagacaacaagagttggacagaggggagccaagcagctgctcagggaaggaatatccagccagagggaacaagaagtaaaaatccctagaccagcccaagggagtgtggctaacataagaagcaggagaacactcaggacttaagccaatgaggttccagggacctgactgcttaggacctgcaggccattgtagggactttattcagatgagatgggaccccatggagagacttatgcagaagagtgacaggatctgattcatgcttgagaaggttgttctggatgctttgttgaagatagattggaggtggggtggtaagggcagagcagacagaccagttaggaggctggtgtaatattctaggagagacatgatggtggtttggagctagtagtaggagtgcaggtggtgagaagtgctccgattctgggaatattttgaaacttgaaccaagaggatttcctgctgtattgaatgtggtgtttgagggcaaataaataaatttttaaaaatgagtcaagggtgactccagagtttttagtttcagccatgggaaggatggcattgccaatagtaaaatgagcaaagaacaggtttgtggacaaagaaaaggaattcgattgtggaatggtaagtctgagaggagatggggtattcaaatgtaggtgttgagcagcagttgaatcggtgacgccgggttcaggggagaggttcttcatggaaatataaatatggaagtcatctatgtatctaaaagcaatgagaataattgagattatcaaggaagtgagtataattgtattgggagctgctctccactggtgaggaatatgtgcagaagtctgctgtcataatgccatctgtggttagggtgacattgtccatgggtaatagagtaagcaacatcttgcatctccctatctaatttccaccatgtgggtttactttgccagacaaactctctactctggtaccactagttgttctttcctaagtagagagccacctcaatcccagccttatcagttgcagccctggccccatttcagagctcttgtcaactccaaccctgccacgcaaggttgagttctgcttctggtatgcctccttcaacctggttagcagagcttacacccaccagacaataagaattgcttgctgtgatgattaatgttaacttgactgggtcacagtgtacccagatatttggctaaacattattctgggtgtgtctttgagggtggagggtgtttctgcatgagattaacatttgaatttgtggagtgagtaaagcagattgctcccccaacaaccctcaacccaacccatgtgggtgggcttcatctaacccactgaaggcctgaatagaataaaaaggaggagtaagggagaatttcctccctctgcctgatggtcagtcttaagctgggacatcagtctcctcctgccttcagatctagacttataccattgactttgctggttctcagattttcagactcagacagagactataccatcttctttcctgggtctccagtttatagagcttgggatttcccagccactataaccctgtgggccaattctttataatcaacatctctctctctctctctcacgcatgtgtgtgcacacacacacacagagacaccattgctctgtttctgtagagaaccctaatatacttactttgtcccagaagcacctacctaagtcatccccagcccttcagctccacttggtttagactccaattagtttcacctcctcaaaacagcagtgtgtgtcaatcccttcttgggagcctagttcattccttaccctgactcagcccagcctagggtaactgttatgatgcagtggcctctgcttttgcagagctgggcagacagaaaggtaaagaagatgcacagaatggagctatgcaaacatgtgcccatacatccaagtcagaacagaagctttctgaagcttaccagagcttcctagacctaaggatgctgatgggattagcgcactgtctggaacatggtaggtccccagggcatctctattgcatcaatagttcacatagaatgaactatagaaagctaagatttgtgctaagatgatggcactagctaaagttttcccttatcgtttctcacatttcctttcagtatactcaagggcaaacctggaaccagtttgcttgggtttgaacacctgagtttgtgaattccaaatcacacatccgcatgcaggttgttgaaattctcttaacccatagtgcctgccactgtaaaaggaggataataatagtgacaagtttgggtatggtcattgtgagaattaaatgtgatattgcagctaaagcacttaatacgggatttagcacatgggaatcagtattttttagctattattaaaagtccttgatttacatttttagctgctaaaccagactaattctatacatacatatgtacaagcacacatatacacataaacataacccagactaaaaatatttaaatgattcccttggctatggttagtgctaggacaaaaactttgtgtgtccagccatatccacttcagccaagatacaatctgaatagcatgcttctgatttctctagtgcattctcattcagaaacagaaaacatgacagagaagcgtgtattgttatcgatattaagtaacatttcacccgcaaattccaaatcttgcggcatagggaaaaaaaaacaacactagaaatacataacatattttcttcattctcaaaactgatttattcaacaaagaaataatcatggagagcatactgtgttccaggttttgtgtgtgtgtgtgtgtgtgtgtgtgtgtgtgtgtataaaatgatagattaacagacttcaaatagttggcaattctgagaactatttaaatgtgctacattggaagtcccaatgtacattgaaaaacaattttaagagttaatcaccctctaaacacacacacacacacacacacacacacacacacacacacacacacacaatttgtcatgtgcaaagacagctaatcctagtaagaatgatagcacaattcatgaagatggcaggccatgccccaacttgaaacctcatacgctgaagagaagctaagtatgcatagtaagactcaaaaacaaaaacaaaaacaaatcaatggatcttaaattacatccaagtgaggaagccaagtagagagtaagtgtggccacttattcagggctgaggcaatagcagataggctaagtaagttcattgcctgggtctttacagaagacagcagggagagtctcactagaacctgacaggctaggagtaggagatcagacagtggcaaatgaacagcatgttccagggctggctgatgatgtgaatgcagataagtcacaggcaccaggatgttcgtgcgaactccttaaaggaactcaagggttcaaataagatcctattgcacaaaatgcttaacctgtccttaacagcagctgctgagctggaggatccctggattgccagcttgagtctctttcctaaaggtattagatataaaattagcataagatttgttaaatcctagcactgcagaagctgtagagggcatgccttgaagtttaaatggagtaaattaaggacaaatagccagaaaaaaaatatttagcagtagttagcaaagttaagaaattcattacccccaaagatatgggggtatataaaatataaaaaagattcctaaaaagtttagatcaattcagagatatatccacataggagtgaggttttcagggacaaagacttagggtcctaaggttggtatctttgagagtggcattgatggagagataaagaagcattgctccatatttcttggtacctccaggctgggcctcttttgtaattcctgtatgccagtagtccctctttctttttctttcttttttggagacggggtcttctttctctgttgcccaggctggagtgcaatggcatgatcttggctcactgcgacctccgcctcctgggttcaagcaattccccggcttcagcttcttgagtagctgggactacaggcatgcgccaccaggcccagctaatttttgtatttttagtagaaaagggatttcaccatgttggccaggctggtctcgaactcctgacctcaggtgatccacctgccttggcctcccaaagtgcttatattacaggtgtgggccaacacacctggccagtaatccctctttcttttattaaacatatcacccccactttcagtcttggcattttggtctcatgcatgataaaatgcccagtggaagtggctcacacctatataatcccagcactttgggaggctgaggcaggaggattgcttgaacccaggagtttgagaccaacctagacaacacagggagactggtctctacaaaaaattaaaataaaattaaaaagcccagtggatagtcactgtgcttctgcctgtgccacatctttgctgttacagtcttgtttctcttattttaacaggggttctgccgcaccaaaaaacagacacgaccggcctaggggaagggagagggtgagctaacactttaccttggcttccagaaatgctaattgttcccaaaggatcaagtgctgccaaagcctcaccccttctttgtccatcctaataggcctgcttgtccccatggaaatattgatgaattctccgtcataggatacggaggtcattggagaaggaagcaatttctgtaaacaataatccatttgtaggtttacttttccacctaccccccacccccaacaaaagtaagtgagggctttgtgatccctggaatgggagataatacataaaacatgccaaggagggtgccattatggtgttcaccatgacctaaaggagacgaagatctgggatttggaggtaagtacacaaagatagcaatgtagaatggggagcatgtgaataaggcatctctattttagctgagaaaaatatatgaggggaaggcttgtgatttccaggtcatgtaccttagccaattccaacacaaagaccatctcagtgtcaaaaggtcatattcagagagctacttccaaacaggcgggaattggccttatacagaaataatgtggtaacataacccccagaggaaaatgtgttttcagttacaccagggccaggcccagcctttcccacaagctcttcctaaataggaacttggcaatgggattagctgagctggagcggacatccttggctttagaggtgaggcccatcagggtctggaggaaggttgggcagaggttttccctgctgctaatagcactgaagaatcagcatcacatccattttattaatttccttgacagacagctctagttaccatgcaggcaccacaaaatcaaaacatacgcatgtcaaggggccccatctgtggtggggccctgccaaagcccatgttacatcaacacgaggaagcagagcacagctccacacaccatgtgcttggtcccatgggccatgccctggaagaaaaccaccagagcttgattgaaagagccagagaagttctcgtggtgacagtcctttatcctgagtctgggcttttcatgttgaacataagatccctgggagacacgtggctacatctggcttcagggtctcgtctctaaacacagctacacagacctccctgccacctccattcagttccacccatgcaggatgagagcagcctggattaaagaagatacctaaaggaatgcaacatctttatttgtaagctggatctgagctcagagttctgctgagctgagacctttggctgcataatgagcataggaggattttttaaatcaaggtatcccttgctatcagtgttgctaaagtgattgaaggagctccaaagcaatttgttcctttatgtggagcaatgttaactatcagttggctacataatgccgatttggcaggtacgaaggataaggacttagaaaaactcctgctctaaataatatcactcataggtgcccaaggtgagcaccaatgcatctgtatcctcatgcttcccacccatccctcttattgcaacctaggccatttcctcaaaaccatcaaggaacttggcagtcaattaggtagccacatgacagcaaaaggcaggaggtctcatacctttgattgcagagcttccagcctcctttatggacctcgtgctgactcatgaactttctaaggatgtaatttcccaccttgccagctattaattctgctccttacatagtaagaggcaagatgtaagcccagatccagagctaactgcctcccatgccataacagaaaggctcaagctagacccgttttacacacgggtttgtcaccttgactgcctaatctaagaacagtctaaggatgaggactggagtgactgttatcccaggctccagaagcccccttgctagtggctgggcgatcaatgcaaggctctggaaacacaatcctaacctggcccaccctgggaggacagagtcggttttttttctctccttgcctgcactggtgcagcaggtatggccaccttggggactctggagtgtctgtccagccagctctgacaaggacatgaacacatccagaccgcctgtctctcggtgcaaagggcactgctgccgaggactcagtacattgtttcgctctccattcaaacaaccgcggcatgtcagtcctgctggcctccttgattgtgcagaaataaataaatgaattatgctgttggggtttgggcttcagcacaaacacatggtctgcatttatccacacagtgagaggtccaccagccacttgatataaaagagcaaaatgataattcttttctttaggcgctctgttgccatatggaatgtatataaatcatatttttgttttaacagcggaggctttgttgatagataaacatgtggtttatctaaaaaaagaggggattgtgctttgaacaatcatttaatggccgtggatgtgccaaataaaaataaaaacataattttgaaagaagttggcttcatgcccaaatccgtaacaaggaatttctccttaacccaagtggttagagcccgtcgatctgttttgagtttaagctgtgctctctactcaaccccacgacaaatggaatcccgagctaatgtgctctaataagacgagacgttacctttatgaatgacctcatggagaagaggttggcaagcatggtggagaggccttgagccaggcagctctgggctatgaagcccaacttcaactctgcgaggcagattgcgtcatcaccttctttccaattccagctcgggatgtttagcagatgggcctggggaaagaaaagcaggtatgagaccttgctctgttaaatgttcaattgtttaacatttcttctgggaaatgcagcattgcccaaccactcagggccatccagtcttgcccttcttttcccttgctgcggtctgatgtttgctgttttatgcaactcttctgctcatcacacttcagtctctctggactgttgcttctgcacccaccaagcccaagtcctcccctgggtttgtcatttagccaaatagagcccagagggaatttcctcttgtgacagacccaacagcctgggttactaggatgtctagctaaatcattaagttgagtcctctaatagaccgtaggagtgccaaatgcctgtatattttcagtttcttttttacctgcctttccaatactccagatcagtgactcccaggcatcaggagcgggcatcagaatcacctgtacagtttctgaaaacacagattgctggccccccaccagcatttctgattcagtagatctggggtaaggctggagaatttggcatttctcacaagttggaggtgacgctgacgctgttgatctaggggccacactttgagaaccactggcctaaaacatcaggtaaatcacagtgtcgacgtttccaatctcttgcaaatggactggtcctattcaacccttatgtcaggccctgagacaagaacccagaggcatgctcatccaattatttttaagtggcatgaagcagagagtcatagaaaatacattggatgaaagaatcaaagttcaaaaggttctccagagttggaaaaatcggcaaaagaccaaactaaaaagatttacaaggctttcatgtcaagtacagcatttaggctaaaaaaaatcaactatataaattcaaaatgagaagacctagcttggcagcaggcaggagagaaataaaagaaaacaaaacacacaaagctaaatttaagtgtgtgggtaactaaaacctcaaattttaggctagccatgtgacattacagagaaagccagtgtttactttttagaagtgctccccagatcaagggaaatgaacatttcattctgttgtgaattggtcagactagttccagagtacttgatccagttttcagtcagatttaaagagggaaaatgatcaactgaataacttccagagaaaagtgacaaagacaagaggaggtagcgtctggaaaagatcttttgaggaacagttaagacagccagtaatatttggcctgaagaaggctctcgtcctcacagagacaggatggttacatctgaatacttcaggtgctgctgtgtacaagattaggtttgtcctgctttgttctagaagccagaattaagactgactggtatatattccaagaaagcagatttttgtcttgttttataaatgaacttcctaaggatgtaatttgtctaccaaacggagaaggttaccttaaaaaatgaaaggtctttgtccctaagactcagtaagtatttctccaagttactatggaaagaacttttgctctgcactaggaggttgaatcagagagcccttctaagtctctgctagtgccaagattctatggctttgaagttattatttctctgcacatctcagcaaacacaaggagcaccaagggagcattcccttcactttcagaacaatatacaatagttgaactagaaggatggaagactccattgtgaaaacaaagagcaagtccaagggttccacactctgctttcaaaaatactattcttatgaaattccttcttgcaaaatccgcttctgtgacaatcttgtgcatcctaagccaaaagtgggtactccagggagagatgacagtgccctccctgatgagagcatggttaaatagtctcatggaggggccacagcaagtggtaattgctgtcaaactatcaaaggaccttccccacactgcagactcaattccaacaactagccctaccctttattccttcctctccctactctccagtggcttcagatggccactttcccttttacttcctgggcatcgtagagaacacattggtataactggagaaatactcacttgcagtaatatcatctgagaacctgagaggaatgaggagaaattcagtttaagtaatgaacaagtcaagcattgtgtgtgaaaggagatttttttggtccaagccctaaagagacagctctgaaccttcatggcaccttcaaacaaacaagcaaaacctttcagagaaagtctctcctatccgcatgtgctatctaaggtataaggctgaggcatttcatccttgggtcccccatggccctgtctggtttgagttctgtaggcatattttgagctttctttctcactgtccaccttgacacttggccatgtgattatatagaaaagttgagtttgttccttatctcagggttctgtgccctctttttttggatattatattttctccaacgcagggaaggagtgagggtgacctgctgaatgcttggagggaaatctctgtgcatgaaacaaagagaagagactgacccaggaacataaatcctttgtttctggaaacttcgtccttttccatttgaagtaaattgagtctgatgaaaaatgccagtgttagtgcccagaagtctggaggcaaatcctctctccctaacttggagaatataaagagcaggtctggcagacctggctgcccttcatttctgctacttcaccacccctccctcctctcatggagaaggaactggaaatacgctgtcctggaaaaccaggagagatggatttcagtcctagttccatctctcactacatacaattttgggaagccactatgaggaacaaagaaggccatgaaagaggaaacgatttaatacaattgcccaagtgtcagggtggacagtggaaaaaaaaagctcaaagaacttgcctctatctgcactgggctcatgggacttggcttccagagataaaggcctctttcactagagtctttgggaaaaataaaaaatccactgagaggtaaatcatcaggagtgatacttttccaagaagttataaaccaatctttccttgaagagctttgagccatttacactcaaatcagaagatgcagggccagcatttaaaagatggccagcatgaaagcgtttctctccaagaattctagtgatattaaaagatacactttggagagcatcagcccttctataatgcctactctcgggaaccacagtttggttcaatgggctgtggctccatttaaagagtcggtggcagtaagctcttctgtctccccgctcgctggctgcagagtggtggccatgatttgtgcccagcagagctgcgctgtctatacagagcttagatgccctgctctgaagttaccctgggatgctaaaatgcacagatggtccaacgagtactaaagaagataatggatgtcaaagctcttttaaaaccataaaatatgacacacatgtctacaattatgatgatgacaaactcagggccagttttacatggagagaaagtaggcagcttccctacatccctctaggccctagaatattactattactggatcataggggattgaaatgcttcatatttcaagcccgttgtccaattatgaaatcagctatctcttggaatatgttcatagtgacatgactttacaggcacataccaggtcctttcctgaaagcaaattgtaatgcatggagatctctaagcatctaggatgagtgcagcaaaaagtgccaagaaaggcagaaaaaaaatgttgaaagggaagaggaagaaaatgtattgaaagagtaggaaacatctcaggaaacacagcaaaactgtgaagcaaggtgaagaatgtccatttgcaattctacaaggaatgaaagacaaacaatgatgagtggacgttttcttctttctctagaagagagatatgaaagaacaacaacaacaaaatgccctgtgtcaaagtcactctattccctgtgtcctgactaatcatccaaggatctgtaagtgattctgcccaaccccaaaactcgaatagtttgggatggttctaaacaaaatgtgttttaagcaaataatcatgaattggttgatatcttcctcactgtttctgaataattacaacacagaggtttgccaaacacattcaggttgctatgatcatgtgattactgaccagggactgtctggatcccaggccggctgagctgctttgagttggacaataaccacagctaaaatcctccttaatttcttgaagatgctgcatcagcactcattggaaagagaaaaaaaaggaactgacaaccccttctaaacatacaacattaattttcctattcaatctaaattcagccaaaaatctaaacaacagcttaaagcactcccacactaaatgaaatttcagatcacaaatgaaagaaggagagctcgttgctgcaggagctgtcactagtcacagccttgctaataaaattcacctccacctacaagggctgccatcaaaaacttctccagcttgacacccgtacattaccaatatcctcactttatctcttcagtgtccttgggttttccagagacaaacaggcgaatgtgaccttgggtgcccaccaccaaatccgttggctggagaacaacacgttctgcaagggagccacctgccgagggctgggcagtggctggcagcagtcagccgttctggatggtgggccagtcactgacagcaggctccactcagtgacagcctctgatgggcctccacacagcaaaatgggccagcacttgccagcaattaagaaataacggcatggcactggtgcatttggcagaatggggtttttctctgcatcacctgactgcctatttcatagggaatatggcccataagagggggtacgctgttactcataacccagcagcgagttattctgtacagacaggacacctggctccaggtactgggcagcctccggtttctaggtttcattaaggacataactggtactgcatcaaatggagaaaggtgccaccttccctcccctaaagctgtttttttggaagtttattgactggctgagagaaggagcactgcctttgaatgagacactggactctggtttactgagaagtaatcacagggaaacagcatagactctgacttttgtcttctttctaatcaatcccccactgtaagctataacacaaggaaaattcctttctctttaatctctggatagcttactattttcctgattcaactctgcaaattctcatctcgactctgggaatgtgtcccacattacactcttacagagcgcattatgcactcactagttcacctggtctcagatagagaaatcctatcactcacttgcctggagcattctacaccttaactgctaaatccccgaggacacaaaatagggcttctccttcactgatattcctgtgggtgtcagggagagtgctaatcacacagtatgtattcaataaatatttactgaataagtaaatgactgcagcacatacaaataaaagttgttgtaacttaagtatggatgggatccaagagtaaatcaatagttctgaacctcgggttccaatagacacttcccgaatgaatgaatcagtacatgaaggagcatccttccagtgaccaaatgcaaacacgttgtttggactaaagaaatgggccagaggcgtggtggctcatgcctgtaatcccagcactttgggaggccgaggcgggcagatcacctgaggttgggagttcgagaccatcctgaccaacatgcagaaaccccatctctactaaaagtacaaaatcagcctggcatggtggcgcatgcctgtaatcccagctactcaagaggcagaggcaggagaattgcttgaacttgggaggtggaggttgtggggagtcaagatcatgccattgcactccagcctgggcaacaagagcaagactccatcccaaaaaaaaagaaagaaagaaagaaatgtcccaggaagatttttaacaatcacacctctttacccaggtctttgagttgcgcacatgtgggcatgtgagagtgtgtgtgtgtgtgtgtgtgtgtgtgtgtgtgtgagcctgtataatgaggaagaagaggctggacctgtggatgggtcttcagacctggagcgggctctcgcactcctaccttgttgtgatactgcagcatttgagtgatgattcttatcttcggatggtagttctttatggagattactctgaaaaagaaagaaccaatgctgagacaggtctgccttatgcatggtgtctgacaaaaagatcaattttactgtctccaaatggggtacccatgggactgaggtaggaggcaggacttgattccagaggcagggctcagataccagacaaaattgaagactagctgaaacagggatggggcagaagcaacttttcactggacaagcccagcagtgtgccctgtcagtttaccattgccatggcaacacccaggaggttccctataacctctaggccctagaacattactattactagatcataggggattgaaatgcttcatatttcaagcccgttgtccaattatgaaatcaactatctcttggaatatgttcatagtgacataactttacaggcacataccaggtcctttcctgaaagcaagttgtaatgcatggatgaattccagtcccagttccatctctcactacatacaatttggggaagccaccatgaggaacaaagaaggccatgaaagaggaaaccctttaatatgattgcctaagtgtctgggtggacagtgagaaagaaagctcaaagaacttgcttctatctgcactgggctcatgggacttgcctttctatggcaatgacccggtgacccagaagttactaccccttccctagaaatttttgcataagctgccccttaatctgcatgcaattaaaagtaggtataaatacgacagcctgcccagagctgctactctatggtgtagccccgctgtgcaggagcagtcacagagctgtaatactactgcttcaataaagctgtttccttctgccctaccatcagcttgcctttgaattcttttctgggggaagctaaaaaccttcatgggctaagccccattttggggctcacctatcctgcatcaggaccagcagccagggctatcctgaggggttgcagacactgggccaggttaaacagtattcccaccaccatatctcttgctagtgtgaaaacaaaatcacaaaacagccacagtctgtgtcctgggcatgaaaaatttgagggccccttggaatgcattggagatgggatgtatgcatgtgcgtactggggagtagggggcctggagcaggggctgccagcttattgcctacgtagacatcgaaagcgagcccaaatcatggggcctccagaggtttgcaatctcccacaccctagggactagcccagaaacaatctgctgagtccaattctccaagttaacaacttgagacaacaatgacaaatcaaacaagcaggatgacaaatggttctaattgtgacacatgcttggccactatcacaaaaaatgatttctaagcagggcttttaggatgagatcaaggactcagccttccatagctaatagagaaaatgatgacttaaacgctggttaaaaataagtgccaaggcattgcgggggtcatgatctggtggaaaattgtctcctacctgccctcagtccaaactcaatgttaagcatggcctgcacccaccccaggcctcacgtgtcctccccacatcaattatggtgctaaagggaggggcagagcgcagatgaatggaaacacgtgggttccagtcacagctattgtactaatgaactgcgcgacctttaggaaaaccctgggctctctgttcctgtttcctcatctggacactgggagcaacagtacctgctttatttacttcacaggcttggtatgagcagcaaatgggagaccagatgtgaaaatgctttgaaatcattaaaagttctctccacgtgtaagttatggtttttgtcattaccaagtctgtcagaagtgacattgtacatttccttctgtgacaaggaaggctaaagaatggaattccacagaaaggcccacctcctaagcctaatcagaaatgcaagtgcatttattatgaccacccccacaaacttcccacccagcagcgctccccacttcaccccttttagtgcagaaatggagagaaggcagccagggagcagctttatctgaaaagctgcaacgtacgaatttaggaaatggatcacgctaaagcctctcccagcacaaattcaccctgcgtttttgcacttgaaggatttcattttatttttgaaaaagtgttgcgttggcccacgcttataactcaaggactttgagcctctgtcagccctgccttgcagttcacagcttcagccagttttctgcattagctcatttcaaatggatctttgacattttaatttcaaaggaggcagattggtctcattaaactgaggaggaaggaggattatacaaataagagaaagacaaagcccatttttaaccctgaacttcccacttctttttgcagccaaggcctcagttctggctctacttaattacatttctgatactacctttgaccagtaatttctttttttcttttctttttttttttttttttttttttttttttttttttaagacggagcctcgctggctctgttgcccaggctgtagtgcagtggcgcgatcttggctcactgcaacctccgcctcctgggttcaagcgattcccctgcctcaacctcctgagtaactgggattacaggcacacaccaccacacccagctaagttttgtatttttagtagatacggggtttcaccatgttggtcaggctggtcttgaactcctgacctcgtgatctgcccaccttggcctcccaaagttctgggattacaggtgtaagccactgagccccgcccttgaccagtaatttctatgcctccttgtcctgccagtcaccctagtacctatgtgtcttcatattaaccctaccacagttagggtttaaataaaatactacaattaagagaaacacccatttcaaaactattactcaggtagccccaaacatctctgtggagtcaaaacattaagcttcatcttcttttggttttccatttggaattttgaagacagtgaagccaggttccttaaagggttacatttttttttttaaatcatttccaatgacagaaaaaggtgtcaaaagttgaaaatccttcctacttcaaagaaaggaacaagtgacacacccaaccctgatcctggtgtagccactgtgcagctgtaactgattcgggaatgagcccaggtgtgaagccagaatctgttccaccctctctctgcagcctggcaagcccaaagcttagaagagttcacgcatccacttccttaaaatgacctcactaagcatattgccaaagaaaactgagtggcaagagaagatggtgccagatgttgcctgccagacacaaggaccagatgcttaagggaggactggctcctctgaaatgcactggaggaattcccccacctcactgatggggaagctccggtcacttggggccactgatggaaagcaaagacaaaggcaatgcaaacattgtcaggatgtaaaggtaacttcttgaccttcaacctcaggtaagttcccaggaggcagtaaaccaagccaccggtagagggggaaccttcggcccgaaagatggctgttcacagttaggtaaaagttcctgggaatgcagtgggacggaaatcccactgaatttagctcaactctccagaagcttccctttatcatttcctctcagccctcttaactcttctgcaatttatgctacagaaaagacaaattccaaagggcctctaactacctggagcaaaataccttgactttttagtcatttcattgtcacacaatgtgactactgggtttatgcaaggaacaaaaactgaacaattgctttttttctgaattaagaaaagaataaggtgctggtgttggggccaatattagcagttgacaggcctaacccttgtgcacaaaaagcactgcacagtgtttcccagtatgacctcccctagatgttctgtaaaaaaaaaaaaaaaaaaaaaagggagggcagggcagggcagggcagggccacagcggcacactcctgtaatccagagttttgggatgcccaggtgggaggatcacttgaggttaggagttcgttgagatcagcctgggcaacatagcaagaccctgtccctactaaaaaaaaaaatctaaaaattggccatgtgtggtggcacattcctatagcctcggctacttgggaggctgaggtgagaggatcgtttgggctcaggagttcaaggttatagtgagctatgattgagtccctgcactccagcctgggcgatagtgcgagactctgtctctatgaaaaaaaacgggggggggttgggggaggtgggagaggagcagaggcttatagtcaaataggtttggaaagtgttctatagtacgttatctcagagatgcatattagtattaaaagcactgaaaagcctttcaagaaagaacattaattttgggaaactggatgaaacagcctaactggtcactaaattcccctttggggtgataggaatcaatatgccgtagacacacttggaaagccctagtaagggttttctcagcctcgacaccattaacattctgggccagacaattctctgttttgggggctgacctgtgcattgcagggtcgttcgcagtgtccctgggctctacctatcagatgccagcagcacggtcccctagttgtgacaaccaaaaacatctccagacattgcaaaatgtcccctgggggcatctgcctttagttaagatatctcaggcccatttcctttagggaacatggtactttaattcaggccagcacccatctcaatctatttcctagttctgtctcaaggaatctcaaacccaaggccagctgtaagccctagagctgccacctgctgagggtgagcttccggttggtgacaccctgtgtgccactgccccaacccacacagacagcctcggctcccccaggcctatgcagctggtgagttgtacagtggcttgtggggcaaaaaggcctcatagagatagtcctctgcagaagatccaaaagggccgtgaacagccacagactgccaagcccagggccttccgcagcgccccaagagttacctcatgatattcgaggcatcctccgcatccgggtcagcgcagtacttgttggcaaggatcaggcatgcatctgctgactctatctaagacaccgaaaggaaaattcacagaacacaaacatataaatagccatgctcgagtgtagtctctctctgttgacagcttcttggggaagctttgcaaagaaaaaaaaaaaacaatcctgagagcctgagagattatagtttttgtcaaaagtgtaggttccaagttcttgttatggtataaacatttcatcttgttgctgttggagggtacaacatgtaccttggtaattatacttttcatttggcatcgttgcttacttgtaggatttccagatttctttaaataacaattaattaagcctttcagtctcctccccacctcctttctcaaccatctgcaccatcatcctaattcttcctatcaggagttggaggtgggtgggttaaatcccttctctccagttagcaaggtaactgagtattggggattcagaaatgtacactctgaagtccttcatctgacctttttcacatcttcattttctataggctgggaagagatcagagctctaaatcagataacatcaccatattgcttagtatccgattagtattcagatattcagaagacaacaaatctatgtatgaaataatgtgttacagttgaactcaaaatatacctactgacttatccaaacacgagcccacaggggtttattccttagaggggaccatgagtttgatgtgctaatgattgcttgcatttaaattaggtccacgaacaataacaattgtccctacgttctcataagattttacataagcaataacttgagttatgtctggataatatcaagattaactggactctatgagcataagaattcttatgctggctcaggtctgcaatctgtcctacttggtatgttatacttaatagatcattcctggattttgagggaggccataatatcctccgtggtatgtcacaaatcatctctgatttctttaataatataaagaaagaatttatccaaatccttttggattattcatcttggccaattatattatttacaaaattatgcggtgaccacagttagcatttagacttcagtgaattcattatattaatgtacaccccctggcatgcaaatattgaacatgcttacaaaatctatattacataggtaaagtagcagatgccattttgccttgtacctttcccttctaagcctcaggtgtgctttatgagaagattctaaattaccagtttctggaaaaaaagattcgcccattatcaatgatatcagataactgcatgtttagttttacaccctgcgtcttagatggggaaaaaagaaagctcaaatgttttatcgcttagtaaaattttattttatattttagcctaatgtttctttcagatgtaaataatagaagtcagagctatattgagtccaacttaagtgttcaatataggaattacttgattattatgttgtataaagctactgggtccatataactggtctacttccttgatgagtagctgattttgaggaatccagcaaagcaagtttcatgttatgaccagtccaagtgtgggatggttataggtagtgttgcatatgccagcagaaggaggtcctgggaccagtggaagggtgacctcaaggttgctggtatgtgattgatctcattaggtgtttaggagatgactcgtggccaacctaggaggtgtgtcccctcagcacagagtcaggactccccccagacccacaccaagatggaataaaagcagaagtcacctcttcctccttaccttgactcttgcaagatcatgtggattgaggacggaaccctgataaaattccacctgagtaaaatgtcgtttgaacagagcttcaagctccaggttgggggagatgctacacagggagagaagaaatcgctattaatttaatggactcgggggtttcagcctccatgggctccttcctctctaatttccacagggagccctggggagaggctgtgacctacagtcacccttttgcttgccataaataaaagactcacactcaagagaagtaaaaccccagcccaactgaaaaccaaaccagtaccatggtaaaagaaagaggttcatgggctttaggaaggccaagacctcaggacaaatgtcttctcttcggtatgaatggaattcctatcttataaatatggaagctgggctgcgccactagtgggatggttcattttatgcggactgtgccagagggtgcccagatccagtgtgatttctgggtgtgtctgggagagtctctggatgagaatggcatttgaatcagtgaattcagtagactaccctcctttgtgggagtgggcatcatccagtcctttgagggtctgaagagaacaataaaacagaggacagaggcgtttgtcccttttgcttctttcctgccggcttgaactgggcatctcttgtcattctcctatccttggactggggttgacattggctctatgactctctggccctcagactcaaacaccaccagctttcctgggtctccagcttgctggtggcaggcagtgggacttcccagcctctgtaatcaaatgagccaattcttcctaataaatctctctagagatagatagatagatagatgtatcaatatatagataccgatatatatctgtattagatatattgatatatatatttcctattgactctgtttcactggagagccctgactaatacaatcaaggattagccgaaggttcccctgggagaggcatcctgctgttccctccatcatgaaccttatctctgcttctgtgtctcatggacttctcatcccccaaggcctggatcaaaaagtatcactctgaggagccacagacagacttaatttactctcattattgttcttgattcacacacatgtatgcgactcatcacatttcttggtgctgatctgtactgacatctttctctttggaggacaaggattaaacaagtgacctatttattcatttgttaattctgcagagatgaaaaagactgtcgataaggtaccgtgctaggcactgggagatgatatttagttagaacctactatacgccaggtaccgtgataagtcaacacttgcctaacatttgtgaagtccataatgacaataataataatagttcatgttttgtaacatttactatatggcagataacattttaaataaataatagtaaaatagtattataaataaataagtaaaataaataatatttatttattttattttattttacttagagtttatctctgtcacacagactgcagtgcagtggcaggatctctgctcactgcaacttcccaggttcaagtgatttttgtgcctcagccttcagagtagctgggattataggcatgtgccaccatgcccggctaatttttgtgttttcagtagacacagggttttgccacattggccaggctggtcttgaactcctggcctcaagtgagccacccaccttgccctcccaaagtgctgggattacaggcatgagccaccatgcctggccatgatgagcattaattcatttaaatctcaaaacaaccctataggcaggtatgttattaacccagagcttcaagaggttaattaactgggccatctactataagtatgacattgatggatgttagggatacaaaggtgaatcctagcaatggaagcatgagcagccagtttttgttttgttttgttttgttttgttttgttttttggagacagggactggagtgcagtggtgccatcttgactcactgcaacctctgcctctcaggatcaagtcatcctcccaccacagcctccagagtagcgagggctacaggcacgtgcccctatgcctggctaatctttctatttttgtatagatggggtctcactgtgttgcccaagctggtcttgaactcctgagctcaagtgatcttcccaccttggcctcccaaagtgctgggattacaagcatgagcaaccacaccttaccagcttgtttattcaaactaaagcagtggatgagagaaaagtggctgcctctgtgaatctgaccagtctttcagacccatgacaagtcatacctcattcagaagcctgcccgggtaataccatagactgatgctccttgaaagagatgtccccagtcacttctgccacctgatcaaaatgacttcagcatcccttggataacacagggttgatgttgtctctaatggttgcatgtgtgttcatcttgaaatgcccaactcatgtgggggcacagcctacacactatacctctagagaactttccaaaacgctcagtagaggatgggccacacagcaggtaatcagtggctaagcactgaatggaacctgtgggtacctgctcctgtgctaacatagcctggtctgttttttcaaagtttggagaaatcagtgcagaaaagagaaatgttggtgccccaacatggtgacaagtcagaagtctagcattctgtgagcaaatgccagaggacgacgatccaccaaacagggagtttgtagggaagccgacctcagtggaacctcagagtaggaccgcgtgctgggtagtcaacagcacgtcaagccagcacaaacatgttagctttgtcctggactttgcgatgtggtgccaggactggccccatgacagccccatctccataaaagaagatgaccatggtaccacacatgtcaccataatggagccccctaattctctccattcctggggcagactaccttttatctaaaaagaggattagtcaaagttgaaaacctcaacattgggtagaagggagataccttgctttcctcccctgtaaaacatacaagataagacctacctcctaagtggattatacaaccaaatatatgttatttttcaggctgatagctaacacttattgaagacttactgcacgcctgactctgctctgcacacttcatatggattaattcatttcattctcatcacagcccaactaggtaggaactactatcatctccatgatttatggatgaggaagctgaggcacagggagcttaagtaacttgctcagccagtagttggttgagtcaggattcagatcagggaatctgagtccagaatatgtatttttactctgtttgtggagtaaatgggagcctgcatgcacagtgacgggctagggtcccatgctgggggttcctaggaacggcagttgttattactattaccttctgtcctgcttcctcttaagttggtgtcttgcttggtcaccaactgactccagaactcctaacgtatccacaccatacagctaatcatcccacagcagataatgtggacacgccagattgctaaggggacaatgatgatgacttggacccacaatgagctccactattatttcttccagagataaactcggatgtggtcccagaatcgcctccacagaggcagactctgctctcatcattgaaccagtgtgttgcttccctttccattggttctgcaatatcttctccaacgaggccaaaagggatcatggcttacccaactctggccccatccccagtgccattccccaagacctccactcttacagacattcagggagtccctcgcagggtgtgtggttgggcagagggtctgacagcagtaggaagctcttacttgtgaagaaaaacgatctccacattgacgtcatcccggtccttgtgcagaaagtccttcaggaagttggaaacactctccagagtgatgtgtccgcagaccacaatgtgcctgaacaggagaggccagttagatcaggccaggcaccacgacaggaccctgcatcccaccccctggcaagacagcagaagccaggcagctgcaggggaagcattcatctcctccctccgcctccataaaagcccagctcccatccccagagggcagtgaggcaaagcagcggtgctagcaggtgctgagactcctagacagaaaagccatatggcttctcacctgatgctgcacaaaatcctattaaaagcccaactgtttggccaagtggttttatgcatttaacaataagtgacattatgcttgtgcttaaatgctgcattatcaagtcccttgcagattcatatctctccctttctgcccacaaagcgtcctccggggagatttactgtatgagtcttggtttatgacatagagcttatcaggtaatgagataacaaatcttgctgaaacgatgattttgtgtgtaagaaagcagacttttatcagggtggctaatgtgcggcctgacacgttataggttctgctggccataagcagtaaaaaggaaattttgcatttttccactataactcctccgacaatgggggcatgtaacactttacagtaagtgagcattactcagggctaaatggggctgggatgcctatggaatggaagatcatgccagctggctgtgcgtccccagagggctgcttccttagggtgcccgggatttccaggagagctaaaggaatttacctcaagatggggagatgctgggaagggatgaggctggaattgctcgccttgtttgagggtggtttggacttctgtttctggaagtagtggctcacccggaagagatgagccccacaactgttgagactgacagtccctccaaccgctcggggctcctggccaatctgactttggcaccaggcaatgtcatggccacttatatgtgccacataatgcccagtcaggagtgagcatttgatgcaagagtcagccacaagacaaaaagccagggactgactgtggagataaaaccactggcttctagtgaagagactgtatgtagcaagaggctcgactcctgtccctgtgccccccaggctcatagtgacagcatctgagtctctagctgcgctctgagacttgggcaggtggtgaacatgcagcatggtaatttcctgggtaaaatttagaatggccatgtcccttgcacttcataattgctctgtgcacattccactaaggcagaaagctcattggctggaggtggctcataataggaggcagtgatgatggcttatgcaatgttccattagatgccattataagagcctgccctttcgttgtaatttggtgcttgactaagtatgtgagaataatgcagtaaactcattggtgaaaggataatgatgcagaacaaagagtaaatcaataatatgcacgatgcagttaataatatcaccattatagactgttattgttacggtggtgcacttagcaatcaggcacgcagcggccaccaaggtgagggaagagtgtcaatgagctacttcagaagagatgtcttaacatgatcactttgctctcctgctaggttgatgaaggtcccttagccacccacccaaattttatgcccaaagcccatatgactaaccccctcattagtatatggtgagtagtatgaggctaagacagtgtgacacacagtgtatcagaatacacaatatagattgaacatttggatgatatgcattttatcatatattttaaaatgtttcttgtggcacatgtacatttacatggacaaaatacttcaaataaatttgcacgttctgaataagatttcagactttgaatttgccaaatatgtttgaagtgaatgagaaacagaattcccctactgacctaacttccttgcaactgacaatagggctactttgccattctaacatcctctgcacatagacttccaagattaggagcaaagccaacatgaatccaatgcgtgggtatctccacaggacagatacgtggctgaggctgttctcatcacttagatgtgaaagtaagccagatgtgattccctgctctgcgaccaagggtgtgggcaaagtatttattcccattcagtgcaggaggaagctgagaggttaataccacccagccggcctcctgtgccaggcattgtaaagttcgaagttctataccagcataagcctggttattactcaaagctaggctcaaatcaatgataggtctggggaaatgcctgaacattcgttcttcctacccagcatgcaaagaactgaatgaacatcagccagcatctcctcctcctctctgaaatcattcatccctaggaaagatgtgtgagaagtgcaaggggaaaagatgagttcccccctctcacccttgaatcaaaagctcagctggctgatttattcagccttagaaaaagtcagggttctcttccttgaaaatgtactgggtacatataaaatatattccaatgcaatcaatattatcccttaagcctttaattaactttcacttctcttaagaagtagacaaatgctggcaagagtgaggagaaaaaaaggattgacttttttcatttggtgctagctatccaataccattctagacaattgaaaatatatatcttttagccacagcatgatttctggggtggagagctgtctttatcaaaaaaggaagaaaaaaaaccttccttcaacgtaattggtatttttgctcagaaaaaaagcgagattgattgaaagcagattgcctttttgcccaaggagagttattaggtacattatcatggcaaccttggagaacccatattgttccaatctgtcctatatctgatttgaagatttatggcctcccccttttgtgccaataatcatttccctccattttgttttccatacagtgaaagttatcaaggagcccacatattgaaaatgtttgaatgcagttagaattgatggatggggagaagctgcctctaactcagcaatcggtattaggagatctgcttccgccagcctgtgtctgaggagggccctgcaagagcatgagggatggatggtgaatggggaacatttatttaccagaaatattttcaagacttttgaagattctagggccatagtttggggaaggatattattgcaggaagaagagaactagaatttattgcatcctcaattattagagatatcaacacaaatatgttaagatagacagcagggtgtgacctcattggaggcagagtaatggttgttcacagggcatgatttgaagaatgccaaaaaagatccccatccaaagttatctctgttgggttccatgatgcctacatatctaccatgtgagattcatactctgatagccctgtgttaactcagctcagacactaaataactaaatagtcttggacaatgtaccaattttgcattttacaattaaaaagccagagcctttgaggggccagagctggtgcctgattcatgaagttatcctgatatctaaggagatgatacatggaagggccaagtaatctgctccatggtaagcactatgaaatggtaagtgccatatggtatctgtaaattaggatgtaaccaatataaagtattctgtggcctatgcaatcccacctaatccttcaacaaccctgtgttctcactgcctgagtcttttcaggtaacctctctgaaactctttccttaagtcatatatgcctggcatcccacagcaagtaaaagtgacttgcccaggatgcaatctgggtctcccacttcagttcccactaagatgaaggtggtggtggaaaggaaagaggcttgtatatctcagcttctgctccttcagggcaagcagaaatggacccacagaggtcctcctggatacatggtggagggggtgttggaggggtcctccactggccaagggagaggtttagtctgggaactggagtggataaaccatcacagttttgcaagatcactagagtctggctggataggcagtatcatgatagtcttagcaaagtctgattacaggcagaaatcataagttccaccggtcaggaactctaagccaaacttaactgaagccatatgattggagcaagctaaggggctgcaaagtgatgcaaatgtccattttattttatattatattttatttattttttagagacagggtattgctctgttgcccaggctggagtacagtggctcaatcagaggtaattgcagccttgaactcccaggctgaagcgatcctcctgtcttaacttcctgggtagctgggactataggcatgccaccacagctggctaattttcttttggtttttgtagagataggttcttgctatgttgcccaggctggtcatgaactcccaacctcaagtgatctgctcaccttggcccccaaagtgctgagattacaggcatgagccaccgcgccctaccccaaatgtctattttagacatgtcatgtacagctcaggacttcctcaccagcctggaatctagaagataataagaatcttaatgatccatttacaatggggaatatttaggaaagttcagctatgagagtagctaaatctctccccatctgtggatgtggatctgaactttcttagaccatcagcgattgtcctgaccaatttctatagggcctgaccactcaatttgtgaagatgaccaatagtcctcaatcaataaccatttctgatctgatgaagtttttggttttaaatgctaggtctggatctgtaaacaaatatttcttgggcaaaggtaacataaaatagatataagctgacaggtcatggcttagaataaaagatccacctcagaaacacaaggaagcatcttcaatgccaaaatagtatccaacggcactttctggagaggaattattcatccagtgtgagcaagtagtgcctggtgctgggtcagggctccataaatatgggctggtttaactgaaaagggcagtgcggtgggtcacggcattggaggggtaagaatgacttcatgagaagaagtttgatgattatgaacactattgagggtcaccataaattcgccagttgcttatttcatgtgcatatcttcactaaatatacatgggtgtgcttctcctgccatttaagcatcgctgcctccagaatgaaatcccacaaattcttctcaatccttctactctcttctcagtgatgggccaggaaagcctgcatgcccaagttgagccagaacttcagtttcagagctcaattccacaggtacacaggacaacctaggggaagtgacttaaggcagaaggcagaagaggacaggagggcagtgactgaggcatcaagagagccactgaagatgacttttaggtctatgacaaggaaaatctacatacttttcccaagcctcagatactggttgttagagccagtagcctttgaaaagggaaactgtgaccatggaatagtcaccattgggccccctcccacgttcttaagtttatctcagcatctgaatgaatagcccttggcaattgtttaatctagcacctttcttctctttgatgtggaaacaggttgcaagatgagtgccagatccagagcacaacacctccctcagtttcatgccttctgatgaaagaaagcagctggtgccagggaggataacctaagctgggaattgggagactggggggcgagttctcagtgacctggggccagtcactaaaatgaagaggcccaggctgactgggctgcacccaccagacactgatgaatcctcacacagggctccagttctctgtccgaccttagttcacacctccatcataccttatctagacatctgcaatcgcttcctaactgatttccctatttactgtccccactgcccccaaccattcccacactccctcaaaaaagccaaagagaagggatggcagcaaatcctactgcgatcaggttctgcgagggcggggaggccttagatctttctttagcagagcctcgctctaggaagacaatgtaaaatgcacagctctgggctgtttatttttaaagatactatatccatttttactggaacgagtataaagaacttaaaaaacccagagctatcttgtcacaataaatcagacagagtaaattgaaaatcctatacagctttgcctgaatacattgtgctcactttgtcaaagaggtagatgaaatgtggcacatattgatctagatgtctctgtaaaactataatatttatatcaaatacatatgctagactctctgtctttctgctgagccttctaattgtgttttcctcgtcctgctcctcccaaaatgcatctcaccattggtagcccctgacatgatgggaatgaattttaagaagtacttctcaagagaaccagcagcactgtatcatacaggaagcagggcgtggggggttagagacccaacgacctaaaccacacagtggtcagcaccaaagcttcacgtttgcccccctaggttgaccttgaacccttggtgtctgcatcaccacctctccatgacactcctgcaagctggcctttcctttccttctcacctggtagtgcttttcttggctacttagtcttaatgcaggtttccctgatttggggcatgtccttcagggttactgtttcccagcgcttcccttgaggctcaatcccccactgccaaaaaataagactaatccaactcccaccttcccacttcctcctttactgaatgtctcaaagagactgacttcagtaaagataggggagacatcatgggcaaatgaagcctaactccaggctgtgctgcctcatccctccaccctaccccaggacctggcttggaacccccaaaacttgctgggctttcaggaactatttgttaactgatggattggttgacaaagtatgcatcttggagactctatcccatggtaagtgcagaaaaaagttaacaggtagttcactgcaagccttttagaccataggcttattccaccaccctgaatctactagcatatttcaagtttgtaagggatctgtacacataaagaaaaataaaaacaaagcaaatgagagtgtgtatcagtcccacaaccccaaaccctgactatcaccatttcctgttaaaataatttttttaaaaaaaaggaggttcagcaataagataatttcctatccatggacacatctagtactttgctaatcacaaaggaaggaaatgcattctccctcctagtgaggaagtgaataaagtaatcttcttctccagctgtcaatggagctgttctggatgtggcaggctgtgctgctgtttccctaaatggggcagaagtctgagcaaatagatcccaacagtgcagcaaaggcacctctaaagcagagccccaaggtcagaggacagacaactggcagccccagtggggaataccgggatgtcccacctgggccaaaactttgcatcttatcgcatgcagacagtcagaacctcagctaccctagagggatctgtgtctacacctccaccatcccaaatcacagttagacctccataattagaccgtggtgagaaatgatcacacatattttgtagcttgtagcctacatggagcctcagtccaagtctttaaattctgagaaactcagtgccggggacattggtagattttgcctgtcctgcatacaccctctcttctgtggacagcacctcattttaatttggggaattgctcctccccaaattaaatacagtctcccaattatatacagtcttgggacctttagtgaaggttttctgcccaagtgaggccaatgggtactcttaaatcttggatgggctgatgctaatcacagtgggagttgattcaacctgatgacaaaaccctgtaatgactactcccgagtttccacttcctcagtgtcagagctgcatctctggttcttttctgtcctttctgggatcttgctcttcagtttttcattggaatctctaaggtaccctaacctttaaaaaaaaaaaacaaaaaacttttcttcttaagtcagcaaaaaaataagtttctgttgcctgcaaccagagaatcctaactggtagacttgtttacctttactttggtttctcacctaattctcactgttacctagtatgcaagtattaccaccatttaggtttctttctctctcctttcctttctttccttccttcctctctggaaggggaattctgcagctttcttcagtaagcaattccacagttgctgaaccctcacaaactgcactgattcctcctatgcctccctccccaacaccctcacccctctgcatcttattcatcccattactttgggcttggtggcctttggccattttaaaataagcaagtcttcccttgacctgaatctcccaatgctagatggttctctgctcttacagagaaatcagggagctgaatggcactttccttttttcagatcaaagcagatttgcccgatttcatttttaatgctgcttctgtacaagcagagactgagagaagactaaggcaggcaaaggtcagcctcactcttcagggatgaaggtggaatagagggagaatgagtccaagcaaagaaatggctctgaattttgcccaggagagggttttgatttacaaagcgagccccacctccctccctaacacccctggtgaatcatgtatcatggtccttgagcacatactgttgggactgaccctcccataatgacaaccaacttgacatatctttgccttgttctccagccacacccaacggtgttgccacagctagcataagctgctagccattcactctgtagactcaacatacttgcataggccccagcagacctccagcatctgttagtcacacagggactggaaggagctacaggttagaaggctggcggatcacctgcggtcaggagttcgagaccagcctgaccaacatagagaaaccccgtctctactaaaaatacaaaattagctgggcatggtggcgtacgcctgtaatcccagctactcgaggggctgaggcaggagaattgcttgaatctgggaggtggaggttgtggtgagccaagattgcgccattgcactccagcctgggcaacaagagcaaaactccatctcaaaaaaaaaaaaaaagaaaaggaaaaaagtaaaaagaaggcatgatacgaggcatgacaggccacagcaggacctttgtggggtctggaaaggagtggacctcaggatcacatcagcggattcccaaccctcccaaatctttctgcacccctcttttactgggtctgtaagcttttaggtgaacaaggcaatctgctattacctatgctctccactgttcaatgggtatgttcaacaacgtgaattatcaaatgcttttgggaggcttccctctaatgtctcttgctttcatgattattgtacacttccatgatttcaatgaataaaattcctgaaaaaagagcatttcactgggaagacgctcctgcatactcaagcttctgtttcactgccactgtttccttgggtggtactgattggtcagaatctcagataagctccaggagagcaagaaccacattttacccacagcacatggtggggattcaaattattgtttgttgagccaatatgttagaatgggagttttcctaaggctgttctatacactagctgacatttgcctttggagtcaatggctaaggtcatataagctcccactgagatgggcacatatctatctctgaactgcccccatgtcctcttgttagaaaggtacaaggaggggagatagattacttttccagcaactggtacccatatttggaacagtccctgtggttctgggggtgacagcaggccattgtgatgcaacaccagtactggctgtggagactggaacccttgggacaagagaatcagatttccacaactctcacaatgtattgacctctataatgttttaataaaaagagacactggacttggccagttagaaagtttcctggtttagtttcatagtatgatgacagcagcatggaaggaaccccaaagctaccaggaaccattttgcacagctctggaaagaagtccagcagagtgaatgacatggtacgaagacagaaaacagggggcaacctagtctggatggctgcaattgttcctgagattctgaatctacccggcaaggattcacccaatcaaaggagccattgatcagaatcttcagcaattataatttgagaaatcatattcgaattattttttaatggaagaaagaatatttgagagtgaaaatctaggcttgaatacgactttttttttaaggtacacagttcatctcccacctacatttctattcttgttttcagaacaatagctggaacattttgctaagtgtgtggaagggaagagtgacagcaggaaaggaggggagcttcattctatcagtattatcaggaaattgatttaatatgcttccaagtctctttaaatagagcttcaagtttgaaagggactgaagatatggcttagaggaatccaaaacagatgccaagaaagaagtgcccatgtcccacgcccaccaagacccctctcatcaggaagggatacctagcacatcacatcagaagacatggcatctaatgacaagcgctttgggtatctacccctcagcaccacgtttcagaagtagtcaagaggtcatttttccaaagtattagggcaagctcattttttgttttccctgttcccaagaagtttaatgctaatcaaagcagaatgcctaatcagtccaagatgttctgtcaacttgaattatctatttgtcttcttatttactgtatctgtctgtctacagttcttcatatctttataaagatcggttattggggcctgtgtttccttctgactagaatcgctaccagatgatccttcctggtgatatgttgatgatttgctaatttatggcttttaaaatctaggaatccaaagacattgctgaggggttcaggctggggaagtcacgtggctcatgcaatgagggctgaatggctacttgatgagggatctaagtctgtgtaggatgcaaagcttcagtcacatttcgaccagagccatgtctgcaatagagaaatcgtaaatgacattttataggaaacacccctcatgagagcagtccgccccttgcaggcgaggaaaagtgagaatagctgttgcccaagacacaagtaaacatggaaagaaaaggcctgtggatcggcccaagtcagtataacatgaaatcatctcaaatccgattcccaagtgctagaggccatgccttcccagaaagagtcgagagggaaatggtgttgtagcaagactctctcagaaccaagagaagaggtttcaataagccctgatattggacttcccaaccacttaggtggccaaatagtacgatgtgtagctcagaaaagctgtggtatagttggagatttttatggatgtgtagaaatgcatctgtccccagtgcctggtagcaagccctcagtaaacacatgtggaatggatggacatgaaggcatgactcgtgttaattcctttaaggtagggtaggctatggggccatagattaaatgagtctttgtaaataaatgatccatgctctggcacactagacaatttaaaattccaaatcctttagaaatcagtctagaaccctggtggacaagacatgagtgtggtggaggaaatggagtggaattccacgttgatacaagacagccaggcaggagggaatagtgtgcgctctcaggaaggaacaaaggttctgagtgagaaggagagtccaaattctgatataaggaaagacacagagtttaaaaataacccaataatcaggaagcagggaagatacgcaggatgccatctcccgataagtcaagcaagcactgctcaggcaggttggggtctgagcgagcaatcagtttttaagacttcctctagtggaggtagaactgaagacctatgtttgcaagtggggcttgcataacctggattttaaaagcaagagtgttagctcccccagcttagtgggtaatgcaagctgggtcaaggtcattgaacaagcgttagttagcatctcctcctctgaggtgtcgcttccttggactactttatccagtgtaactaatccctgtttttctcagttgcagaatcttagtcttttctggttttgcagcacacattaaaaatgtgtaattggcatttgctttagttgtacccttgctcagtgcttgcaacctccttgagactgtaaactccaggaggacaggttccgagggtagtttgttcgccaatgaaccctgagcacccaacaaaacccagcatcatgcctgatgcataacacagagaatgcctgcctgccgagtgagtgaatgaaccgatggagaggggccacaggaatggacagtgaggcaggtcactaactgtgctgggctgtttttagttcttgaattttgttctcaactattgaatactcaattatttcttctaaagtatggaatcctctttaaaatatgagcatttacaataaagaagataattaagtactctagtttcatatttaaatagaaaagcatgacaaactgtccccatctctctgaatgtaaggctctttccaatgtggagaccacatccgaggttgaaggcagacagccctaactccctccagcgggatacaggctcctgagggtgaatattccaagtcaaagctatgaaacaaacacacagaatgcaccctgcagaactggtcacgtggggctctactgtgcctttcactgataaggaagaaaccacctccagatactgctctgtgctgtgcggcagactaactaaggagtgaaagggaacaggtggttccatctgcaagggtatagaaggctctgcaggtgagatctgcccagcagggaagtccaagtttagcagatcactacaattctccatggaactacctttaaaggatggagccaggaaggggaagaaaatgttgaaatccacaaaaaaggcacaattctcactttaggtgtggttcatctgtctgtccttgagagcctttcattgctagaagtgttcaagagggaattagaattctagtctaaccaaatgggaaaaataaaggaaggaatggttttgtcccctctccatctttttcccctcaatcctggggccaggacccttaggggtagtgggtgggcaggaggggagaggagacagccccaaagtgaagctcatgcctttctcttcctctccatcatgagcacggtactctggctccccttatacggaaaggtggaggaagatacaaacaataggagatcactgagtttagagcagaatggagtctcaagagatgacatggagaggcagcaggacgcagggaagcaggctgtccaggttcaaaccccagcccaactctttactagctgcgtgatgtcaggcaagttacttaacctccctgttcctcagtttcttcactcattccaaatggagatgatggtaatacctttctcacaggatcaatgtgaggattctgaaatatgcaaatatttgtaggtattactattgccagagaaggcagtcctggggctttaggctgcactgattcacattctcatttcaggaagtgtgtggcactcctgtctctataggcaaatgttccaagagaagccacagcatttaagtttcacaggcagctttcttgaattggagcaagagacgggttagtccatgacaactattccccaaaccagaatggcggctcagcagcttcatcctgaggaccttccttcaagttaattacactcactttcctctcccaccttggctacatctagtctttcatgactcattcccctctcgtgtgccctgtcagcatttggctaccaggaatcagtagaataatccaaacccatcccattctctctgtcccaaacacctgggcctaggattgcctcaaacttgagtcactcaagtcccaacatgggaaacacaaggtctgggtggctcccggctggactccctctaacaagggggttacagcagatggattcctctctgtgactgattattttccatggcccttggccatgtgaccttggaccacgatcttgtcagttctcataaactaaccaggagtggaatgaatcacactcagggaggagacctctgggggaaactgcaaggggctgtgagagggaggagagagctggggatcccaaaggccatgggagcgtcaccagccctcaggccttccctgtctctaagcagctttgaccttacacaaaggaaaggaggaggaggcagtggccttgggaggcaggctgggctgcaggagggctcccttatgaataagatttagggtatcagcccaagagcccagagagctctaatccctccaactcagagagattacctgcctcagctactcactgaacccttggttgtggacacccaaacccctattcttagatgctccaatccatcataacatacatgaaatagccaacacacacgcacatgtgcacaattacccatacctactgcagggactgggtatccttcaggaggtgatgaaaatgttgggtaaggcactctaggcccttgaaatagtgttgatggtgaagaggctttgagaatgctacttgaaatgtttatattatgccaaacacattgattaaaactgaaaatgaaatgccaatgaaatcttcatattctcaaatatcctgaatttgggtgttgtacaaacaaaaccctgatcttctctgcctaaattttgtactttaaataatctttgaatttcaaagttttatgtctctgtagctttagatcatgagttaccttgagttctctgacaagttaatatattgttagagaaatcatttctgaataaaatatgcacaagtaaacaaatcccttaactatgtatacattctaatttctttctgggcatttatttgattgggtcctggggagcagagaacatgtatgtgtgtgtccatgggcagagcacatggacttatgcatacacaaaaactcagagcacagcacactgttttaagagtctgaactttatctttcaacaaagtttagctgctttccttttgcaaatgcatttaattttatctggaaactttttgacgttagaaatagaacaactgtagtttctcattatgtttgctgccagaatccatgcttggttgctcaactaaagaccttatattgctaattactaccacatgcccatatcccaagcgaaagaaaacttattgattctgacagcccattctctcaacactgaattccaaatgaaaactcaaaatttggccaaacataacatttcatcaatcttgttttactgactggaaaaacaacatcaaacaaagggtgctaatggccctttattaccgtgcctttcccaagcttatattttctgatgaaagatctaagtgaccaaaggccttctttaaactacttagtaattagcttttgaaccaggaaacaatgcataaagtagtgaacaggcccggtgctgatgacaggacggactctgtgtctgcagggtcaggaacagtggggacccaaaaagaacattaaaagcaaagtgcattttcataaacggagaagaaaaaaaagagaaagagagagagagagagaaaaccaggctaaaagcggtgataaaagattacagagccagaacagagtggcaggaagtctgtgatctgaagtcatcagcacctgaaagtttgagtggaactgccagggtgaaagatgaccggatcggactgggggcagtgagtgagtgccgggctgagagccccatctgggtcagctggcaccgaaagctgccggcctccagcccacccaccagctcacccacatttgactaggaaaattatttcattaaaaaaaaaaaatcacctggaatgaaagtcaagaaatattttcaacttagccttcagggcaattgattttattgacttcttggggcagtgattgggaaatgctggcggagacgtcagaagatagggaggccataaagagagccccaggccctcagaatgccttctgctttatggagacctgtccacaccttcaaggcaaaatgaattgagatgctgttttcctcttggcatgggatacatgaccactgggaatctttggacttacttggccttttggatccaaccaatggcccagaaatcagaacagcttggttctaacctcatccagggctgttaagataatattgaggggagggctccattagagggaagatggagggatgtgctgcctcccggaaaagacgccaactggcctcctctggcccactgtcctttgtgcctttgaaaggaaacgggtgtcctgtgggtagttcaagaaaatgagcccttttgtccacctcctcatttcctgtgcagaggcctggacacctgagctcaggaagcactggactcactgaccaaaggggagggtccactctgtcccacacggctgactgtcaaaaagagaaggcagcagtggagggaaatacaatgctcccagtctgattttatttcctcttaaaaaaacaaaagaagctctttaagagttcatttgaaacagaacgagaagggaaaacaaaacaaaacaaaacagttccatgataggaacgtccatgactgggaagaggcatgagtgatgaaagttttctgtgtcctgatccggatggtaggatgatagtgactgggtgtgtacataggtacaagttcctcactttatatgttaaagatgtgtacatttaactctatgtaagttatacctcaaaaccaaaaacaaacaaaggtgactactccagaaaaagctttaaaaaaataaataaaggatggctgctgccagccccctctcccccatggcattctcctcttgaggttgtaaggtactgccctctacttaggaaaaaaccttggggtctctattgaacctgcacattgatatcgagagtgataaagtgatctgagcacacactaaaatagttcccgagaagaaagcattcacatttgggaagccaaacaaaagatttggcaggaatagcatgtagtaccctaaactaccagaaatatactatttcttgcccggaaggaatttcagctgagtaatgagtccctttgaggataagatcggtgcctcctggatgaagaggagaactgggttcccagtggccgcagtgcctttgcagtaggccagatgacctggatctgccacccaaggacttctctgccagagtcttatcctgtgttcttgctacacacaaaccaccataggagggcatcatactagtttgagggaccagaattttatcacatagccagatgatggaagaatgaacgagttttgtttacttgttaggggtcagaagagaaaatatgggcccagttataaatggactcctttcaggataaattcattacatctcttggaatttgtgaatgggagttggtccaagcgtggcaacgtcctcgggtcacctctgacatcacaccccatgcagaaactgggccttccctcacagaagcacccggtggggttggggaggggcagaattcagatggcacctccacagggactcctgaaagtcactcaaccacatcttttctgatgcaactgacttactttctgcctccatgtttgttaaaagtcccgccgaatttattccgactcaggatgagagcagcaatttcgggcacgtagcgggcaaacattgcctacatgcatgaaacaaagaaacaagagccaaaaaaaaaaaaaaatggcatgcagagaggattctaccgcagcagaggcagcaaaacctcttggcatacttactttcttccactaaccgcactataggagcccccgtatttcttgcggtttcctattaactctatgatttcagggacgtagctggcaaacatggcctgagaagataggagacagaagagagactaaaaagacaggccaaagaaaaggggggacctgttcagagggtgggggcactaagatctgaaaacacaaaaggattaggcctgcaaaggtatatattgatatgttggatcataaaaaactaaaagcacgaagagagcaagctcccagaaatacacaagacaaacaaacattggccaccttgacaactaaagaacaaaaaaaaatcacagtcgagaaaaatacaaaggcgacaggaataaataaggtgatatctagttcttcttgctgaagaaaaataggcaagagggggacatgctagtgaaactaaacacacacagacacatgtgtgcatgcacagacacacacagtttcgcaagagaagatcttcctttgtcattaaaattcagaggagaatcaatgcttttatgagtgacaaaagaaaataaacaccaaaagattaaaaactacatttttctattaaaaaaaaaaaaacactgaaaagctcaaaagggaaatttaggaaatcacctgggaggagaagatagcaaggagaaacacaaatctgccatgttttgtccaacaaacatctggcctgtggctggctggatgggtctttttatctataggcacctcacggatgctgtagaaatgcttgcgtgaatgtacacatgcatgtgcacatttatatacatttttaaaatgtataggccctatgcatacaaaacagagagaggtgtatgcatcactacatataaatgtgcgcacggtgtacatacatgaaagctgtgtatggattaggattttaatcactcgcttcataaatggcaaaaaaaaatctaaacttaaaatgagctactttgaaagacaaaatgcagcaactgccaacgtgtggccagaaatcccctcgatttacattagaaggggtggtttagtgcaacataaagagctgcgtagacttttaaaaagcaaacagtgaaactttcttagaagaaaggagcaaaaataccccatgtgtccgctgcagaatggagtgagctgtttgcaaaactgcactctgctcacatggggatgtccgcctggacaagactaaggtgctctctctcctttgatgtagggacccttctctttagggcaggccccagccacagtgtttgttggaagttaggggaggaacataaaggggaagggagagctcttgaaaccgcaaactgtctctacaaagtatcgacagcttctaccagaggcaggtgacagccactgtccttgtagcataccagatgctgagttacattgctaaggggtagacactctcccttattaacagcatcacttttcttaagacaattaggtttgctcctggctaaatggctgtccccgacaagggcaatgtgcctggatctatgggacaagtgtaatacaccaagaattatgcagaaaagtcaccatcgtgtttggatttacttagcctgattgtaacgttaaggcttgcttctagtgcagaatacagtctaaaatacaaagctttaaggaaatgtatcatggaaaatattaacagccatcaaaatcaacatcataataaagatttttttttaccagtcccccgaggatgaagaagaccatgaagaggcgcccaagtgtggtttttgcataaacatccccataaccaacggtggacattgtgaccatgagtaaatagacacattcccagtaggtgagagcctggttgttttggaaattttcccatgggtcccctgaattctccacctaaagcaaatgggacaggggagaaaaaagaaaaacatgctattgaagtgtatacatgcaataaacgcggaagctcggcactctcgaaggccacttgctactgcacaccactctccacacgagatgtgtggttcccgggctgagttctgtgagtcaggatgcagagctcctgagcaggacacagagaaagtggagaagcagctgcaggagatgtcttcctggctgattgagacagagagggaaagcaagaagggaaatatctctaggccttttctcttcttctggtaaaatgtgggaagccagctaaaattcagggcattgcctctggccaggttttagagcactctcttcaaggaaagagccagagattccgtccctgaccttcctcaatgggtttctaaggcccagatggcctggatctgcctctcccacagaaattctaaacacttccgtagggggctgcctccttccatcagtttatccaaagagtatatatgggccctgcttatttctgattcaaacagcatctctggaatctggccctgctctccctcctttgcaaattggcaatggtggtcccagccttgaggctgctggaatcttcacaggggcatggaaagtgagctcatgagaacagcttgcactggcacagcccgttagatcaagggctggcaaactttttcagttttgtgggcgacacaggtcctgttcaactctgcagaggcaaaacttcaacaaatgggtgtggctggatttggagagctttggcccgagactgcagtttccccactttcctgtccttccatcatatttgatctgccaacaaggctagtaggtgggcaggaaaggtactttagatactctcaggagagagggagctgcgggcccaattttactcaaatatgcctgtgatccacccacagggcctgtagacggtggcccccaggcctccacctctgcctctgcaaaatgtttccagggcctggcctctttcacacatcagtttgtcctcaatgtgccattttcacaaaagtttcctggtgaacctgaagggacttcactaatacccgtagtaaggtggggtcatcatcttattaaagacaactatctcctccacatatgtgatttgggtgcttcgtgcttggttacagcaagaattagggtgattaaggttgattttggccatgaatcccatcagcattaagggctgggcaggagactctagatctggtgactacgtgaggccccatgccccaaccactgccatcccaggcctgtcttcctttgggtgataattacctaaatcccaagtgtgggtagctaagcgcgtccttctatcccttatgcaaatagaggctcagccactggtggtcaactttatccaaagtctcagagctagacgaggctccttccagttgtaacagtctatgtttgcatgaaacacacttcccacaatggctgtgctctctaaaagcagggggaaagtctgccttcgggtggtgtgaggggcttgacttaatacaaggctttcaaagagtcactaatgaaaaagaatgaacatttttgaggtacaaatcagacaaaataatcaaaggtggcttttcgtaaggcggaagtggaaagaaattgagggatctgaatttgttgtttactaggaggtgtgggtccaacttccaaccttgtccccagaccttttccaggtgtttgcttaggaagcactgccatcttgtggcttactatagttattgcagacagaaggaaaatctaccaaagcccccatgacaataccaatgagcaatgaactgaaaaatgcaggttaatagtgcaaacattactcaccatttggaactagtttggggtaaaaaggttggaaacccagacaattgtgtggttgcttcccatcttcctgtctacaaccgaggtgaagttaatttccagcaagataaattttaggtaataaaatgactcagagagggtcttgttgcaggcaagcgagagcagaagggtcttcaaggttactcaccaaatggatgaacccggctgcagtcagccacgtgctgataaatatggagagcagattcaccagcttgatggaattactgtgcaagagacaacaagcaaaatccccacgttaccaagggaaggccctgctggggctgccttacagggtaacagcacccgcttagcaggagaggctgccacatctaactcccaaccatttctccattataagggaattctggaaggtggaggaagctgctgggatgaaggtcaggacagagcctagaggaacaaatttaactttggtaaaaattaacttttatttaaaaaactcttcaaatctacagaaaagtggaaagaacagtataatgaacacttgtacgctcttcatttagactgaccaattattaacattttaccacgggtgctttatctccctacatgctttttctcttatcccccccgcccttttttcttctcttcttcttgccatgtacatatatatatatatatatttgctaaaccatttaccaataaatcagagacatcatggcacaagccctaaatactttagcacccaactcctaagaagaagggcattgcacagcataatcacaataccattgcacgcctcagaaaattaaaacataaaaattcagtaatgctatttaatatgcagaccttatttaaatatctccagttgccccaaaattatgtttattgatttttttttattttccccccagacccaagtttcatgcactgcatttggctgttaggtggcttaaatccaactgtcaggaaacaaggacagagagtaaatattttaggctttacaggccatatagacattgtcacaaatactcaactctgtcactgtggcttcagagcagcttttggacatcatgtacaggaatagatatggctttgttccaataaaactttatttacaaaaacaggcagccggcatgggctatagtttgccaatcccagcttcagtcccttctaatgtataattgacaccactcctttgtaatgacattaaattttgtgtgaacctaggttgtcttctataatgttctatattctggatcctgtttatttacttatttatttttattttattttttattttttgagacgaggtctgactctgtcacccaggctggagtgcagtggcacggtcttggctcactgcaacctctgcctgccaggttcaagcaattctcctgccttagcctcccgagtagctgggattacaggcacccgccaccacgcccagctaatttttgtatttttagtagagatggagtttcaccatgttggccaggctgatctcgaactcttgacctcaggtgatctgcccgccttggcctcccaaagtgctaggattacaggtgtgatccaccgcgcccagcccagtttattttttaaataaatgttattgtgtatgtttgaggtttacaacatgatattacctaccatctcacatagttacgtttttgtgtgtgacaagagcagctaaaatctacatatttaacaaaaatcccaaataccatacaattttattagcaatagtcctcatgttgtacattagacctctagacttgatcatcctacatagctccctacttaagtatttctgttaagaatctcttcggggatggcatcacatcaggatatcccagcccaatgactagctccatccatgtggctaaggcagaaatgctaatgtctccactgagaggtgcccatttccctttgtaatgaatatgccaccttgagtgaggccccgagactgcaggaatatcctgctccccaaaaaccttatacctaatagctttagcattcactggtgttccttgagtggatcaactggaccttatgacattttgaggtccctaagagctgaggccttgtctgtctggattccaggagccctgggtccctggagcatagcagacccgtgactctgcactgagtgcactggtatctgcccctgctctctttctaaactgcatcctgttcagtcccactggggtatacctgaacgctgctgtcagcaggtcacttcactgtccaaaggcttcttgttgactaaaagatgacattcaaactctctccttccattgtcaacaccttgtgaagtcccagtctctcccaccacccctctttcacataaactcttgaaactgccatgccagctaaacctatttactatagctattgtttacactatttactcaacttgaaagcccttcccatctagtcaaatttccccattcttcaaagcccagttcaatccctactgcttccttaaagtcgttccatccatctgcaagacaaagtgactttccccggctctcaactccagccattcattggtaattgatcctactgacttaagatgtcttttgtaaagttttaggttgctatttgactcttgtgttccttgctgcatcttgcagaaaagaactctcttttctagctcttgcattttcccagtagtggcttaatgcagcctacagggttgcccaacccattagttttggtcagttcatctctgttatgactgccctctcttacctctcttttggagaaccaatgatttaaattctaggcatttaagatcacagtaatagtttcagctagcttgtttacagttctttcccagtgctcaccacatgtgccaccatcctaagtgctttaggatcacctgtgctttatgtatactaagtcatttaatgctcataacaacaatctttcttcttctatggaagagcacagaggaatccatagtcttagtttttccagagttgattctgacagttcatggaaagaataaacagattcaactttgtgggtgagactgatatttcaaaatgtgtggaacaactttcttctggctcgaaaacttggaaaaacagccaaaatgtccattctgtctctcttggtcatttctagagttaccagattataataattgccaatatttattgagcccttattatgtgttagatgttgtgttaagcagaattctctcctgcctgtaccttgtaagtcctctaaggtgtgctcccacattggagggtaagaaatagatgaagaactgatagccggcgacaaagggaggcctcttagggaggtgtgtgttgttcattttctcagggtatcgttaaataccaagtggcttcacttacatactcctggattcttgggacctgaacacagcagtgtcccaccaacaaccatgtagagtcctcttgagatattaaacctatttagagtctgagtctccttggtgctttggaaaaatgacctaaatatggtgattactaaactctaaatgatggttacagtgatattagtagtgcgttagggagctcttgccatatgcagaacatttaatcattgttgctaaaacagtccatgtttagctctgaaatctgattatttttatgacatcagtattatcacagatccctaggtttaggaatttgctttctaaatgaaactgtatgaccacacatctgaaagctacaagcaaaagatgcaaggttaacccctggtgggcattctccacagtctgaaatgtgaaccttgccaggttaagtagggctccttgggaagaaagagtgaggcacgccaggagcagggctgtgtgctctgcatagcaaaggttatatatctctgtgtggagatagtcatagccttcctggtcaagcccagggatctgggccaaacacgaagctaccagcggttagaatgatttgaaccattcagattctagcctgcttcctaagctttgagggagattatgatcttatcatcaacacctgatccaactaaagtcaatcattctcatgttgcctatacaattcctgagtctccatcccatgagttctaattcacatcgatggacacagtgaatcatgataggtcaggcacaggattcttgtagattagagacctcttccaagaaactgtggatgctgcaagagaaggtctggctccagagattacagctgtaaacccagagcttctggggcctcctttgtcctctatatgtttaacaagacatgtttcagttaacacagaaaatgccatgcactttgtacaaagaagtgtacgtttgtccctgttctgcttgtctctaatttttctctttgtttctggtactgccaggtgctgctggccttgtttgttttactgctctctttgctggacagatgtaaaatacccaccccctaaaaagttaactggactgcaccacactaacataaatggtctgaatgacaacatgagtggaacaaagtgaaattctgccaattcaatcccttaattatctctagatcccttcttctttctctgccccaatttgcactgcctaaggccatgccctaatacctcttccctggactactgcctcctaattggtcttatggtctatgaggtctttgatgcttcaaccccattctctatacaactgttggaatagtggatctttctaaaatgtcagtctaaccacatttcctctcctgattaaaatccttcaacagctctcatttgttctcagtaaagtccatgaatctaagaacctgcatgatttggcctctccctgcacatctcttgcagtctccatatagaatactcttctttacaaactttatcttggagccatttctaagttcatgtcagtagtaatgttttagtttcaaaaacgcctcccaaaaccatattggttaggtacacgatgactcatgcatatcatggaatgctatgtgagaaacaaaaggtgacatagtagatgtaatcattatctcaaagtagtgtgatgtggaggcaattttactttatcctatgtgattttgtgtgttgttgcaatgtttaccatgaacatattttcaaaattagaggaaacaggctgggcacagtggctcacacctgtaatcccagcactttgggaggccaaagtgggcagatcacctgaggtcaaaagttcgagaccagcgtggccaacacggtgaaaccctgtctctactaaaaatacaaaaagtagccaggtgtggtggcaggcacctgtaatcccagctactcgggaggctgaggcaggagaatggcttgaaccctggagacggaggttgcagtgagctgagatcacgcccagcctggacaacagagcaagagtctatctcaaaaaaaaaaaaaaaaaaaaaaaaaagaaaagaaaagaaaagaaaaattagaggaaacaataaggaaattcccattttggaaaaaattgctgagtgatccatgttttagtcatcaatatttaccacagtcaatgagatgtggaattacagcctttaaacacagctgctgactttcctctgacagtagaataagtgttctagcacctgtgtgttagatctccagtttgcagggcaactgagaaactgccaaaacctcagatagtgagagggagtctccttgtctcccctttaattggccgtttcaggctatggagtattctaggccccctatgggcttgcagtttgggaaagggccctgatgctggtcacataattgtgatttgcccatttcatcccatgcactttaattttccttctgctgcattcttaattctttatcaatctttctgcccaccttatgcttctctgccttatttctttcagctcttggcccagtgaggcagccaaagtactggaaatgaaacagcaactccaaatcattatttcaaattgcattgcaaagcctccatccctgcctaatgccacagattggcaggaattcaccgccaaagagagccagacaaaatctccctaaagacgattacatgggtcccccaacccacccttctggaaggaccgctatgaaagcagcagagtatggaagagtcacaggagaatcgctcaaaagtccaaaaccctacaaaagccaaggctgcactttctctgggacagaactttgggatccacacttggggatgcccaaaaggaaggagccaagattagccaggctggcacctggagagagaatggcctcagagagttgtcctaaagcttctagatttcttacaattacatgacgtttgcttctgtgcctggtgacctggcctttcctaccctcttaacctcatcctcctctttccatcacagaacgcttaatgtccaggagtgcagaattacccaaagtttccccaagtgttatgctctcacaccagtgtgctgttagcatcttccttgattagaagtcaacccccaccctacccctcacatgcccagccccatgaggatgacacttttttctacaaggcttacctaaaagtaaccttctcctcgaaaagatccttgactgccctgcaactcaggctaagcccagcttagttactcccctctcaacccctgggcatgctgacatcagcattaaccacaccgtcaggtggcctggccccctacgcagcaagttctctgacagcaggactcctagcatgcaccttgctgctgataccaatgggtgctcactccaggcttgctgaattatctcaaccatctggttatgaccataagtgaaaggaactctgaaaacccaggttgtgggtttgtggcaaaaagcaccctctaacaacaagagtttcatatagtgggaagtggggtgctggaaaaaggctgttttggggcccggatggcagatgcccagacagccttccaccccgtgactcttccctagggccattctctccctcgtcccctggctggctgcttcagcttccccgctctgcactgagagaggcagcactgagtgcagttggcaggtgagctgacaccagggatcccacagccacttcccgcatccaaaggaaagagaggtgagtgtcctagcagaaagtcagaaaaagatattcagatggtccatcattttctcaagttctaaaacggtccagggagtagacagtattcctcagagcaatggaaccttctcaaaatgctggcatcagagaataaaaatccccctaacatatgatgtaattgtgaaacagggagagacagacactacccaatgttagagagtgtcacaaaacaccatccctaccaaaaaagtaagtgtctcttaaggacaaggctctatgcttggtgctgggtactcacgcgttccatctttaaaacacagtctagtggagtgaatctgacatacgtaaatattggcgagatgctagcttcattgatcgtttacatttcaaaagtaatatgattctagcacatagaagaataattaaaaggcagaaatcaaggttattggcaatcagaaaaacatgaagaaatacaatattcactgtatgtgaataatattacattattgctaataaacagaggactgataaattcttatctcaggataatgaacagtaaaaggcaggaggacatacttttaaagacttcagtgccattggattctctttttcttttcaacttgactaatagaaagtgaatttgacctcacagtcacatagatgagcagtcagagagaggaaaccaatttggaattaaagcaaaataaaataaacaagcaaaaaaaacactaacacccaaggagtaaagccaatcataggttgaatttgttggctgtgtcaggttcattcaggaagctaggtcccagcctgtgttaccaggaaaatgatgctgaatctaatcctcaaaactacagatatattaattacaaatcacaaaatatggaggtgtcctgtttttaatcatttatcaaatgcatgaagggcaaccaaagaggaaatggaacattagaagttagcttcttagagtgtaatttcctagaagagaaatttatggcctgtacttattctccattagagcacgtctaacctcttttattagtttattcatcaagacagccttggtttcaggccagctctgcaagccggcaggtcatcaggaaagggatcctctgggggcttttcctcctggtccagttgtgttttccagatcataacgcagttaacagaagtattcatggtgcattcggcaggaggtttgtaggttttcccccaaaaggcaattcacagagaaagccccaagggctatacggatataaagtgaacatctaaaatgtgctttgaaatgaaatgattttctgtttgccgtatgaggtttgtgattgcctctcacagcattgcttctattgcctttacgactgggttcaatttcttatttagtgatgtaataaaggggcgatttagaatctggcagcaaggacttcccaatcaatgagcaaatctatccctcattcactgtgcacctttccccttgacaccgtggctcttatctgggcaaccccactgggcacacagatatcagctatgtgtccctaaaagtgtccctacttccctgcatgcacagctatttctctcttttcaccacatagttccctggccctgcagaagagagcaactcaaaccctactctggttttctctccctctctgtgttagatcactctttctgtgaataatataactattaataatgtcattgtgatgaaagcaagcacacctgatatttgcaacttggcataggggactggaatgaaaaaaatatgacgaagaacatcttaccttgttttaagaatattcagaaactgcaaaatttctgaaaactgtatcagtctcagagctcttaaaaatctcaaacctggaaaaaagaatgaaatagagatgcattattttcaatgtgtgattttaatgttcacagtctgccatttgatttacagttcccaagggtcgaagggatgggaagttcttgcagaagataaaccagctggtacctcagacatattccttcattctgattcttgactggtttaatctcgactgggaaatggactttctctttataaaggtggcctgtttggaacctctttagaggaagggctcatggggagaagccaggttaatgagacttttcatttggtgatctctgattgaaagcactgtttctaagttacctagttatctggcaggattttgtctctgaaaaatcctaggaattgtgatagctcagggtaacccttgtgctaagagcagattgagaataaatcggataaccttatgtctttgatggattttattttttatctttatcttcagccctgataaaatgaagagtacagcccacagtgttatctgttttctacaaacttctatattttcctcccaataaaaaaaaaaaaaagatcagtgagatatcacaccccacaacttcaggattcaaaatttatatagttccccttttattaagtgttaagataaatggtttgtcctttctaaatcaacaacctctcttgaatgaaaaagaagcatcagtgtttaggtggcagaagagagatggagaaggaaaacacatcaaggacattttaaaaatgcaaattattatgttttaatagctaagagtgaattatatttctgttcaggtgaaattcatggtcaaaacattcagtcagtcctgggctataataatttggctatcatgcaagggaattacttacaaaatgctggtttgtcaccgctttgagacacattgaatgtcacacccactcccaaggggattttcttttgcagactttctagaagcattttattaagcaccgccacgtgccaaaggcagtgcgaagccctccagtgcactgagttgacagacaactccacgcccgtgggtggggctttgttctcccacgcccgtgagccagtaaagggcagcctagggcacagtggtgggaaggaatccttactaccttctacttgaatgaggagtacactaactgcacgcaacgtggagctgtttaggtaataagggaaaattaacttaaagttcatggggtgggggaaaatctgtacaaggaaagagggagaaaaggattggctcaaaaaaataatttctcatctgaaaaggattaaccatcatgaacagaagactttttttgaaaacattctccttctatgctaaataatacttatataacttttattaaataattgcagagatgagacgggatgttgatgaaataaaaaggctcacggccaaaagcacagttgtaactgagctgatgaaaggctgacttagcaccgctgaaaaccgaccacggcgcagagtacaaaactaagaagtcacctcagaaagcagagaaaatatgagaaagggagaaaaaaaaaagatgaaacttcagaaaatagaaacacagtagaaatcacagagatccaacccatggataaaatgtgttggccaaagggaagtcaaaacatcacattgatcataagcaaaggccaggacataacagaaaagaacttttgagatatgaaaaaatgactggagactaaaaggtaaaatgaaggatcagttcttagagaccaatgccaagaagcatctggcttttcattttcacatttcaagtattaaaatcaagcaataaaaataaaccaccagtgttgatggggttatttaccgttaatgtaactaagatcattatatttaacaaaaagtgttggccgggcacggtggctcatgcctgtaatcccagcactttgggaggccgaggcgggaggatcacgaggtcaggagatcgagaccatcctggctaacacagtgaaaccccgtctctactaaaaaacacaaaaaaattagccgggcgtggtggcgggcgcctgtagtcccagctacgcgggaggctgaggcaggagaatggcgtgtacccgggaggcggagcttgcagtaagccgagatcgcgccactgcactccagcctgggcgacagagcgagactccgtctcaaaaaaaaaaaaaaaaaaaaaaaaaaaaaaaaaaaagtgttaaacagcaattgggcaattttcagaatttttagacaaacagaatttgacccaagatttttatacccagtcaagtggttgttcaagaataaaagtaacaaaaaaaatttcaaattctaaggtctcaaaaaatacattgtttgctcagtgtgtgcataaagtttccaaagaggttcacaagacttgctaaatcagaatgggagggggcaagggctggaaattaaatttataacagactctactgctggtcctaaccttccagcccaacctagactgttatctcataccagtatcactgtcgcatattgctgagctaaaacgacaaatgtagaaacgtggagtagaaggcgactggcagttagcactgaaactatgaaagataacaacactcttccatgttccttgagggatacattccaagacctcccagtggatgcctgaaacctcagatagtgccaaatcctatatgcattatatacacacacctacggtaaaatttaacttataaattagcacaggaagggattaacaatggcaataataaaatagaacaattatgacaatatgtaccagcatcactatacttgcgctttggggccgttattaagtaaaataagggttagttgaacacaggtaacatgggttacagcaagacatcggtctgcccactgaagtgccctgagagactaatggccagggagtgcagatggcacggatgtgctggacaaagggaggattcttgtcccagatggaaccaagcaggacagcatgcaacttaaacattatgaattgtttatttctagaatttcctatttaatattttcagactacggttgcctggggataactgaaacctcaggaagcaaaaccatagataagaggcactcctgtagaaatacatgctagcaatgtattagccatttagtgtttaatcctgaacattctgtgtgtgcatagatatgcttttatttatggaactaaaaatagaatacaaacaacctgaacttcaaactggatttcttctttttatctttaaacgatggtgtttgtatcgtatatccattgctgattggcagcttgccacatttgagtgagttacacaaatatagtagaataaaagcttttcttttaattaaggtgcatgaaagtaagggcaggaaagaaatgaatgcagaggccacaaggtcctatactcttgctagacacaaactgcagatctagctctgagcaccttcttaacaaaagcaagcaggcagacaggataagatcaatagtgtatacatatgagagaaaaacaaactggcttgcaggagaatcatttatttttcccaacatggagaccagagggaaatatctccttgcaaaagggacccagggtgatgcaggagcaagacccctgtgggctgaacaagggtggcctttgcttatttgactgcctcatactgggcatttttatggcactgagtttcactaatgcaaatgagccaatgaagttctccataggttaaaaaagtcagtctacatttcatcctcagatcaagccagactatctggagaaatggttggtctttcaggaatcattcacaatagcttccgtattagtccgttctcactctgctaataaagacatacccgagactgggtaatttataaaggaaagaggtttaattgactcaattccacagggctggagaagcctcaggaaacttacagtcatggcagaaggggaagcaaacacatcctacttcacatggtggcaggaaggagaagtgttgagcataagagggaaaagccccttataaaaccatcagatttcgtgagaactcactatcacgagaacagcagcatgggggtaactgcccccatgattcaattaccttccacagggcccctcctacaacataggggtattatgggaactacaattcaagatgagatttgggtagggacacagccaaaccatatcagcttcctaaccgctttctgccctggaccccttgtgttctctgctcagaagcctccaatgccacccattccacacagagtaaaagtcaaagtctttcaaaggcctaaagcaacaccatcccaccaccagcactatctccttttggatctgatggcttcctactgtcactcctactactgtccgctgatctggcagatgtcttcagtgacacttgaacacacaggtatgctactgccccagggcctctgcacatgcagcctctctgcctggaatgctgtttgccagatgcccacatggcatactccctcacctcctttgggttcttactcaatgtcccttgatcagcgtgactttccctggctacccgacctaaacatgcaactcctcccacaccacccgtgcaactccctatcctctttcctgcttcacttttctcctcagcatgaagcactagcacctcggttatgtggttactttctgccttcctctctttagcatcagctctatgaggggaggagctgatgtctgttttgttcagggctatatttccagcattgaacatagtgtctggcataaggtgaaggctcaataaatccttgtttgaactgaatgagtgaatcaaagttttgagaaataattagacggcggagttaaaggttagataatccacattcagaattctgagactatatgttgcctactaaagggaaaagccagaagccctgcggggtcccctgagagaggtcagggctgcactcttgggaagtagaaagtagcctcatcagggaaaagccttaacgaatgaccactctggctatacccagaaagagcccagaagactacagacagcgacttcaggctaagagaggagaccaagataagagaggtgagagggggaactctttggtgacaattattcatcttctctattttataatatcttttattatttttattctataaaatctctgaaataaatgattttctaaggtaacacaaaatagctataatagagttgtgaagaagaaaatgtgtatataccaaaagccaggaattacatgccctccccaaaagcttccaggttcagagagttttacaagtgagatttttacagtttcaaaaaatagtaacttctctatctattctctattatatgatcaattcttaaaaatggacttatctgtgtttttccatgctctgtattggtttagaaagttggcattacctggacacaagttcccttgcattttttcttaaatggcaagcttatcacactaatgactaacaacaataatcctaaataaaatactagggtatcatatccaagactgcattaaatgaataaaagacatgagctatagcagatgctgtagggtacagcccaaatcccctcttcagggaccttatttgtcctgggctcttgaagagtgacctgctaaaggctcagagctagtcccttcatgagaactgccctctgctacaaggagctgcctcacctggggctacatcccctgtcagtggtggtgccccccacccccccaccccccccccaccaccacacacaaatgctggctgatgtagggacaaaggtcagctgccttgcctcaatttgggatactttttcctgtgggatgggttgaggcttcccaggcagctgcagccagcctgagttctccacccttattccctcacaggcatgggcattaaatcctaccctggtgatctgcataccagaagaccgagcattctaagagtccatgtgggcatactggaggcactcagtaaatggtaatttcatcatatgaagaattacaatagcgtaggagtgtacacacgccacagaaaagtcatcaaactggactagaaagcccagaaacacacacacaaacacacacacacacacacacacacacacacacacacacacacacacacagagtacatatagtgttactattattttaaattactggtgaaatgatgatgttgacaatgacattaatctattattattgatgatatctagtatgtttatttacttacacacactaaaacttctaactatatcttttttaaaaaatacgtacacagaagaaaatagctaaggagacacaaatgagacagtgtatccagcatagtttgaaagcaacagagccaagtttcaccacaaatgtgacaaactccacaaagcccaagcttctagccactgccctgtacagacttcagccagtcatttccaattcagacattaggactcaagcacacactttcaagacttgtgatacatcttaccaacttgtcctcacaatttgcattcccttcagtatgcaaatgctcttttgcctgtattcccactggattgagtacagtgatagagaaaataggaaggaaggaaggaaggaaggaaagaaggcatgaaggcaagaagggagagaaggagagaaggcaggaaggcaggaaggcaggaggggaaagggagagaacgagggtaagaatcccaatttgaggtcgggcatggtggctcatgcctgttatcccagcactttgggaggctgaggtggactgatcacttgaggtcaggagttcgagaccagcctggccaacatggtaaaaccccgcctctaccaaaaatacaaaaaattaaccaagtgtggtggtatgtgcctgtaatcccagctacttgggaggctgaggcaggagaatcacttgaacctgggaggtggaagttgcagtgagccgagatctcgccactgcactccagcctgggctacagagtgagagtccatctcaaaaaaattaaaaatttaaaaattaaaaaaaaaatcctaatttgatagaccccaaataagagctcatggctgttttattttgcttttctatcttaacaaatgaagctaattattttttcatataattattagtcattttattttcttctctaaagtgctttagagtggcctttgccagtctgcctgtgtatttatcttaattgtagtaatacaattatgttctcatataaagaagattttgtataccatatattatctcccaccgttcgtcattcttctcaatttggcttaaagtatttttcctactgtcaaattttacttaaggtgggtttctttccccatgaattctaaaatatatcaatctttctaccatgttccctttttttaaaatttttttggccatccccatcatatagataatttttttttttttttttttactgcatctatttttttttctttgtacttttggggcactggttctggactttgactgtacatttaaatcacctgggaaacttttagaattgttgacacctgggtctcagcaccccctacctgcattctgatttaatgggcgtggggtacattcaggcagagggagtattaaggctccagagtgattctaatgagccatccaggttaagaagcattgcaaactttttctataaatgaacatatagtaaatattaataaatattttaggctgtcacaacgactcaactttgctgtaaataataggaaaacaaataggtgtgaccatattccagtaaaatgttattcatataaataggccatggacactaattttctacacttgctttggaggcatgggattcaaatccattgtgcacatgaatcacctggcatttgtaaacatccagattctgactcagtgggtctccgatggggcctgatactgtgcatttctaacaagctctaagctatcgtcaatgctgttggtcagaagaccacactttgggaaaacaaggctgcaaggcagtggtccccagatttctctgccattgcaatcacccgaggattttaaagcaatactgaggcctgcttcccaccagattcaacgggtctgggatacaagctgggcatcagaatttttataaattctgattcgagtgtgcagccaagtttgggaaccagtggttcagaatatattttcttttctctaacctttaatttgttaatctgttttgatgtatttatttattttggttaacagtgcaccaaaaggaccaagctttatttttctaatcaagaagattctaatgtacagccagatgatggatgaggatgagtccagtgtacagccaagtttgggaatcactgctttagagtatcttttattttctttttttaacctctaacttgttaatccatcaggatgtatttatttattttggctagtagtatgccaaaaggagaatgctttattttttctccaaatagcaaatttccgttaatccgagtaatcacttgagtaatttaaaaccagtaatctaccctctaagcacactaccagtctatttaaatcaattttaaagaacatactggctaactagaagttaaatcaataatacaataaaagattatttataaaacaaagcattcagcttaagattttgggggaaaagtagtcttgacaataggagaaagctgattttttagttcagtgtttatgactaaataaccagaaaaccaataaatatgaaaaaaaattttaaaaatctgtagaattttatgggagcaaacaatggcaacaagaaaacaaacaaaataaagttctggctgatccaataaaaaaagaaaaaaattatccacaatgatattctaataaatctgtgaaaaacctcagtgagagggatgactttctgaaaaatataaacttcgaaacttgatacacacaaaaaagaaatccattataggataacaattgagatatacattgaaatatatagtaacagcttcccttacagactctgcacccatatataatttatgattaaattattgcacatacattttattaaaattctaaactgttccataatacaaaacgagatctaaagctactaacttatattataaaataaacataaactgaggaccaaaaactgactctcaaagcacaaaaataaagtagaaatggccctcaacttacaatggttcaacttaatgattttctgacttttcagtggtgcaaaagtgatacctattcaccttaaaccatactctaagtattcacacaaccattctgtttttcactttcagtacagtattcaatacattacactaaattttcagcactttattataaaatatgctttgcgttagatgattttgcccaacagtaggtaatgtaagtgttctgagcatgtttaagatagggtaggctcagctgtgatgtttggtaggtgaggggtattaaatgcattctcaaacttaaaatattttcagtttatgatgggtttgtgaggatgtaactccatggttaaattgagaagcatctgtattctaatatcactaagatcatagatgccaaaattctgtatataataccaacataaattattcatcaatgaattaaaatgataatccagagcattctagttaaacatagcagatggatcacaatggtttatgtctgccccctctcaaaacttcactaaactaatacaaatgttgagggggtaggaaacagcagaatcccacaagaacaaaaagaatggaagaggagattacaacacagaacagacgaacacaaaatgtgggtagatactctgttagaaactgacttggcatacatatatatgtatttatttatatttatataaacatatacatatattttccatgtatatatttccataatgagaaagaaagacatatacacacacatatgtctatctccacaatgataaacagaatattaaaaatgtctttggtcaatacataaagactgaggttgatgggggggtggttgggatgcagagatcacagtgaagaagaaaacaaccatccaaaaggtgaaatgaagtggctgaccctgggaagaaggaggctgtgacaataacactgattgactggggtgccaaacaggagtagtcactacatggcagcaagtgcatacacttgaggtgttaaaatagagcaatatcctgagtaaactgtaactcttggaagaaacacactgtctctacagctgtaagaccagttaccgaatagaaacacacagtagcatatctcagtactccccagacaaactgcaacacacaaagacagcattcacatataggctaacagaagatctcaaatgcaaagataagcacaaaacaggccaagcacggtggctcatgcccgtcatctcagaactttgggaggctgagcaagactccatctccaaacaaaaaaacactgtcaagtacatctacatataaccacatggatgaatcacacaggcgtaacactgagagaacaaggcctgacacagagtcattctatataacccagttatatgaagttcaaaactgggcaaaactgatatatggtcaggagagtggttacctttgtggggtgtagtgactagaaggttgccaggagaagggactagggggtgacaggcaataatgactgtttcttgagctgagcgttggcttctcaaatgcattctcttcgtgaaaatttatccagctgttgccaggcacggtggctcatgcctgtaatcctagcactttgggaggctgaggcaggcggatcacttgaggtcaggagttcgagaccagcctggccaatatgatgaaaccccatctctactaaaaattcaaaaattagctgggcatggaggcaggcacctgtaatcccagctacttgggaggctgaggcaggagaatcgcttgaacccgggaggcaggggttgcagtgagctgagatcgcgccactgcactccaacctgggcaacagagcaagactcggtctcaaaaaaaaaaaaaaaaaagaaaagaaaagggaagaaaagaactaaagaattgccaaacatttgaggaaaggcaactttccttcaagaaatgcacatattacacttcaggccaactgacccttaaggatacaacattaacaaagcattaaacaaaaaatgctttagaaaaatatttgaaaaatataaagagttgtgaaaaactatctcaactcaaaaaatcaactaaatatcttagcaattaaaattttgaacatcaaaatcttaaaaggccagcttaatagaagaatgggcatagccacacagcaaagtagagggctgaactatcacacagccatcttcatacaaaggggcacaggaatgaaaagtgcaaaagaaaaactaagagacccagaaaacaggaataaagttttccacatccatgtaattgagctgccagaaggaaaaaatgaaggaaatagagaacaggaaacatttaaaataacattaaagtgtcctagaccgaaagaatgacctgtatcctcagattggaaaggtcttttaagtgtccagcaggttaaattttttttttttttttttttgagatggagtctggcactgttgcccaggctggagtgcagtggcgcgatctcggctcactgcaagctccgccccacggccagcagattacattttcaaagacctaaatccaagcatattgtggataaattttataacatcaatgtgaagaaataaatcccttcaaagcaacaagagtcaaattattgtcacaattctcctggcttcactggttgcaagaaaacaaaagaaggatatctttacaattctcaggacagattaatttgaaccaagtaatatatacttagccagttgaaagaaaaataaatccaaaagaagcaagatacaagaagcaacatggaaaagataaaagtaatggattcatttatgtgttgactgagtatgttttaaatgaataaataataacaatgatccaaaattaaaatctctggaaataaatggaagatggaggtgtgaaggagagagggcaatgggaaaaagaaaggtgtgcagaaattcttgtcttgataggatacaatcaatcatatatattaacagaaaaaaattaaagtatgtgtatcaaaaccttaaggatataaattccatagcctagagaaaaaaaaaaggacaaaggaatttaatcaaatggagaaaagaaaaaaagaacaaaaacttcagcccatccaatgaaaagaaaaaaaaaataaaaggtatattaatcagaaaacatagttacaatagcaaaagagtccaaatatatttgtaatcataataaaattaaattaaaattactttcacctatggaaagacagagattcacatgatatgaaaacaacaacaataataaattccaggcgcatgctatttaaaagacatacactgcaaacaagacatacagaaaagttagaaatgaaagaatggaaattatgtgcctggcaaatgctgagaaaagaggaacaaatagagcaatgactatatcaaataaagtggcagctactgcaaaaagttatataaaaattatatataaacattatattaaaaagaataaaaagtaatatctcatattgataaaagaaacaatccacaaagaatgtgtaacaaaaaaaaactttatacacctaaaagtattcctttgagataaataaagcaaatatgacaagaatgcacaaatataggacatttaagtagcatttaatcccttgggatatattcgtatctatatgtatctgaatggatgggcagaaagacacacacatatattagtaaactaggaacacacattctttaataacagccatgagcagtctcaaaaactgaccacatattaggccacaaagaaatttcatcaaaatctaaaatgcaaaaatcatctaagtcacatttaccacaaagcaatagaataagaaagtaataagagcatggcaacaatgactaagcagtagagaaatagactctattttatcagaagaattttacagacaataaagaggtcatcacaaatcaaaaggaagacaggcatcatgcaatgatggacctcataccataatggaaataagtttgagatgaattaaaaattaaatatagataataagggacagaaaaattgaggaaaatataggtatatattattagccctctgaaaagaagaatttctaatttcatgtgtaaaaggagtcatacaatctttgaaatacaggctctgccaccaccataaaaacgtcaaaattctgcatgtttaaaatcataataaacacaatatccaatgaaaaaataatcaaatatgatacaataaggataaattctttgtaatgtcaaaagcatgtatgtaaaatactttatcattagttgataagtaggcaaaaatcaaacagctacatcatgaagtagataatataactagtgaataatcattaaataaattaattaaatgaaactattttatcttaacttggttcaaataaaaaaaatgtgcaccatatacaaaaaccaactcacaatgaattaatgacttaagatccaaaactgtgaaactactagaagaaagtattgagaaagagccccatgacaacggtcagggcaataattttttggaaatgacccctaaaacacaggcaataaaagcaaaaatggacaaagaggattacatcaaactaaaaagcttggcccaacaaaagaaagaatcaaccgagtgaagagaggcggggcgcagtggctcacgcctgtaatcccagcactttgggaggccaaggcaggtggatcacaagatcaggagatcgagaccatcctggctaatacggtgaaaccccgtctctactaaaaatataaaaaattagccgggtgtggtggtgggcacctgtagtcccagctactcggcaggctgaggcaggagaatggcgtgaacccgggaggtggagattgcagtgagctgagatcatgccaccgcactccagcctgggagacagagcaagactctgtctcaaaaaaaaaaaaaaaaaaaaaaaaaaaaaaaggaagaaagaatcaacggagtgaagagacaacctacagaatgggagaaaaatatttgaaaactatacatctgataagggcttaatattcaaaatatatagagaacacatctcaatagcaagaaagcaaatagcccaattaagaaatgggcaaaggacctgaatagacatttcgcaaaagaagaaatgcaaatagccaacagtaaatgtttaaaatgtttgacatcactatttatcagggaagtgcaaattaaaactacaatgaactatcacttcacatctgttagaagggttattatcgaaaagacaaaaggttaagtgttggtgaggatgtgggaaaaaggaacccttgcatactgttgatgggaaggtaaattagtactattttccattatggaaaaaggtaaaaagtttccacaaaaacccaaaaatagaactaccatacaatcaagcaacctcaccactgggtatatattcagaggaaatgaaatcaacgtgctgaagagatgtctgcactcccatgttctttgcagcactattcacaatagccaaggtatgaaatcaaccgcagtgtccatcaacagatgaatgaagaaaatgtgatatatatacacaatggcatattattcagccaagaaaagaataaatcctttcatttgcaacaatgtggatgaacctaaagtttatattaagttaaataagccatgcacagaatgacaaacatcacgtgatctcactcatataaaacagctgatctcatagaaagaggggctggggcggttggagggaagggtggttgggtagatgttggtcaaaggatacaaaatttcagttaaataagagaaataagtttaagatatctactgtattacatggtgactatagttaataaccatatagtattcttgaaaaatgctttaaaaaattaaaagaaatgcaaattaaacaaaaataagtaagcactgtatttattctacttaatagcaacatatttgagcttcacctagtggagatgactctacaatgaaatagtcttataattccattgtggaattataaactgataaaaccttttcagaaagtaattcagcattattaatcaaagtaattccatttctgggaatatagcctaagaaaatataacaaaatatggaaatatgctacagaaacaaagatgctcattgcaaaattgttcattaagcaagaaaaatagaaagcagcttaaaatccaaaaataggtcttacgtctgatacatcttctttataggatattatatatgctcaaagattgtaacaaggaaaatttttgacataatgttaagttaaagaagtagaatgtcgaaattaaaatagcgattaccaggagctgaggggagaggaaaaattatttgtttaatgggtttagagtttcaactttgcaagatcaaaaagtactggagctctgttttgcaacaataggatatacttaacattactgaactgtacactaaaaataattaaaatggtaaattttatgttatgtgtttttcaccacaattttttaaaaatagcaaattggaaatgctgaaaaaaaaaaaaaagaagtaaaagatgaagtgcatggtccctatgataaaactatgaaaactataggtatgtgtaaaatgaaaaagtagaagaaaagcataaaatgatgacagtggccatgttacaaaggcagacattttggatttctttaatattcttgagttttttaatttttttgtaatatttatatcaaaatttctatttttatgcataattacttattgctgtagtcataaagtcagtggcaagtcaggactggaatacaggttttcctggctccgagccctgtactcacatgcaagattcagtcacatgagaccattggctccaggtgaggaggaccccctgccagagctttcccttcgaaacttgctgcccagggcctgaacaactaggtgaggctcctcctgagaactattgctgtggaattttagcaatgaccagacagattaagggatcttgaactcccttctcagataaaagcagagttactgtactgacagaaattgagggataaacaggtaaatgataactcattcactgcttcagggttcctgtgatccccagagagaaaagactctggagattcatacatgtgaggtctcgggagaggacaagacagaaaacacaacagcaaacacatccaagcccataccagaaagcctgccagggttttccaatttgctattttccattccctttcactccttaatctttaaatccaaaaagctgaaaggttccaataaacgtctgtcgtttccaatctctgcagccccacgcaaatcctgaagagcaattatttttgtggtgtctgacaaggtcattgttatctggccttgcagctcagagggatcaaactgagggcaggcatatcagggtaaacagaggatgcccaggagcatggggaggcttcttcagggtggtcccctgcacccttctgccatcacaggtcccacctcccatccccagcttggtcactgtgaggaccacctgcttcttagccccagcacagagtgaatctgagcctctccttcccagctggagaaaaaggactgtctcgcttcctctcaaatgcccctgggcttttgttcccacagtcagaatgtgtgttctataaacagttcttgcttgtctgaccttttcaccatcctttcctttggtaattgttcaggttgttttgctccctacttttttaaaaaaattttttgagacagggtcttactttgtcacccatgctggagtgcagtggcacgatcacagctcactacagcctcgacctcctgggctcaagtgatcctcccgcctcagccccccaagtagccagccaccatgcccagctaattttttctatttttttagtgacacagtttcaccatgttgccaatcctggctccctaccttaacccagtcctggttcctgttctgatagatgctcaacatcagttgatattcagactgggattgtcgcccattcattcattcattcattcacccacacacatgcacagagtcactgcttccaccaccccttgtggttccagatgctgcagcacaggggtgaggctcctgcttccaggtcttctatttgaatagaggagccagtaagtagagaaacacattttttaaaagtaaacaaataggacttactcactttacctctttactttgttttaaaattattgaattttttaagagacagtgtctcatggtcacccatcctggggtgcatgatcatagctcactggagtcttgacctcatgggctcaaatgatcctctcacctcagcctcccaacatgctgggattataggcataagccattttgcctggtctgactttacatcttaaatatatgtgaaataacttatcttttccctctccactgccagaaccatggttcacactgctgttacctccatctggaccaagagccccacacgggtcttcctgcttcacttctctaccccagtccccccaggccccaccagcattctccagaaagcagccagcatggtcttttcaaatatccatcagattacattgctccctgccaaaagccattacatggcatccatctcactaaaattactttcagattccttatctcgctctggaaggctctccatggtttctgctcatttcatcaccactctccatgtcctcacgccctgcacacagtgtctctgctccagaaacatttcccagttcgtcctcagctctgagtcttcccttctgtttcttttcttgggaatgttcttcccccagatcattgcaaggttggctaatggaggtcttctctgaccacccgatctggagcccagtccttcgccgccattatccattcttctttatagggtttaccacaatctaaaatgatctcatttgcttgttcaggtgcctgcctcctgcccgttcctcagcagactatctgctctattggggcaggtgtctcactcactggctcactaccaagtgcaccctcttctagaacagtgatgactggtacatagtgagtactcactactgaaaattaataaatgcattaatcctttcaaaggaaaagtaagaagggtattggatactaagttaaacccatggttttactcaattattcaacgttttctcaggaagtagtgtatgtgcccttagcttaataattccatcatttggtctcttctctctagtggctttaatcctgattctctccaaggccagatgttacagtacagagcagctcttctctgtgatgaagggagaggaaatataacaatctggccagctaattctagggttatagacacagaagcatgaatatttagattccaggcatttcagctgacagaaacattttatatcagttctaatgaaaaggattgactaggtttcacttattgcttgccaactggaattttgttaggcacaattacataatgcagaagtatttgagctgtgcctacccacatcagaatcctaaactaggtttcaaagggactacattccattttaaagaaattcctagtactgctaactttcctggaaataaaagctatccctccctaagactgacatttttatggccagaaatgtacatttaatctatttgttttaaactgtaatatattatggatgcctaaataaagccaaatgcctatcagaaagcagttgagaaaagaaaatctgcctagaaaactattcttatgatctctgctgggtaagaataaaaaagtaccacccaagacaggcaagaccacgctcccatggtcaaatgtaaggacagaaaatgagccacaactcgcactgtagcccctgaaaaaaaaattatcgataggtccaaatgcctcttccaaaaatgctgactcactgaaaattattgccatttaataaataggaagcaagctattacatcgtttgccaaactttctcccacatttctgaaatatattctttaatagctcaataacattcaggagcactagaggccagttaaattcatctaaaaaggaaggacgagatttctgcctcacccagcacatctgcgttgggtgggtatgccaagaaaacaggaatcaaggtggctatcacctctccactagacagttccccaaatccagcctagacggaaagcactttttttcccaggcagcctccaggaatacggaatacttttgggaggagaagagccatggacgggtgagtccttaccccaggatgcacaaacaccacagcaagacaccaatgactgccggaagttcggcggttcctccttctccggagcagcaggcccagacttcacccggtagccattatggaacaggtcccccagggacttcttgcggcgcctgccgggtctgtaaagctctgtgccggttctgctggatgggtggcggtacaccagaatcttactggggatcatggtagaaggagggagatgggctaggctttcggctcccttccattcacttcttgcaggagtcaatgctctggaaagacctggaggagcctgtgttcctctgacccgtgctgcaaacaggtcctcctgtccagcgcagtgtgggtcaccagcatctatgtcctggtggagccaatagacactctctcctccctcaccctccagtccctcttgcaagaaccccggcatgctctgggcactggatgcacgcagccacatcagaaaggcggttaagaggggcgggggaagcactctgatccacgatgtcctgcgagctgatcaatcagcttcacgctggaaataaccatgtaagctcctttggacatggtttagggggatagaaagagaaaaggctataattcctcaaatcaagtggtatagaatagagtgtgagagaggctgcagtttggggcccactaagtcgtttcttttattttagtaatcctgcttaacaactgaggactcataaggaggattcccttagaggatgtgatgcccaacaagaaagaaaaactgaattgtcctactcctcctgtcgtggccacctcccaccactaacataacccaaatacgcaaatcctctgctaatcctacatacaggactgaggaagaagagggattctgggctatccagaggaagatgggaggagacactcattagagctccttggcccaccccctgcttctttgtcccattgttttcagcatcttctctcattaccaaccccagccccctcttagttctctgttacaggctacattatggacccccatccctgccaaagtcgtaggttgaagcccaaaccccaatgtgatggtatttggagatgaggtactttagggagtgattaggtttagacaagatcatgaggatagggccctcatgatgagattagtgccattataagaagagagaccagagagtttgctctttctccctctctgccatgtcaggacacagtgagagggcagccgcctgcaagccagaaagagagccctcaccagaacctgaccatgctggaatgctgatctcagatgtccagctttcagaactgtgagaaaataaatctctgttatttcagccacccagtttttgatatcttgttaaggcagcccagagtgactatgaaagtctcccttcccagggtactgagtgtaaacaaaaatatgacacagacagagagaggggaaacattaaaaatataaacaggaaaatatccacattccacaagttgttagctgaggctcctcataatttaatccccacctattttttcagacctctagcaaggctaaaattattggtagaattttcaaagcataacatttcttctcaatgtggattagttcattcacctgaccatgacgtattgagcatctattatgtgccaagcgttttgctgggtactgggtatttgctgattaacaggaacaatgcacaagtccagccttggtggcatttatagtataatcagagagtgaaacaatatatcataactgtaattaacaatttggttaaagtgctgtaaagaaaaaccctaagtaggccgggcgcagtggctcatgcctgtaatcccagcactttgggaggccgaggcaggcggatcacaaggtcaggagatcgagaccattctggctaacacggtgaaaccctgtctctactaaaaaatacaaaaaaaaattagccgggcgtggtggcaggtgcctgtagtcccagctactcaggaggctgaggcaggagaatggcatgaacctgggaggtggagcttgcagtaagccaagatagtgccactgcactccagcctgggtgacagagggagactccatttaaaaaaaaaaaaagaaaagaaaagaaaaaaagaaaacaaaaaagaaaaaggaaaaaccccaagtagttatctgagtatgtgtatgtgtatgttacataaatgtgtatctgagtgaatgtgtatggaaaatgtgacatacatacgcaaaagggcttcacaataattctatatcctaatgatatagtagcagacagccaggtaaaaaaattatggtgatggcaatttttttaggccgagggaacagcatgacgaatatcttgaagagggaagtagatggcctggtcctgacttgaaagaaactcaatgtgtttaaaaagaaattggtgagaaactaactctccaacacctaaagttgtctggaaatgatagacagaactacaggtcctacaaacactaagaggataattttaaagtattaggaataatattatgtctccaaaacttgacaccctgatgaaatgaacaaattcctttaaaaatacaattttctccaactgacacaagaaaaaatagaaaatgtaaacagctacatatctgttaaataaatggaaacttcaatgaaaaacattcccacaaagaaaatttcaggttcaggcagtttccactgcagaattctaccaaatatttatggtggaaataataccaatattacacaaactctttcagggactggaggaaaagagaacccaacttgatttataatgccagaataatcatgacattgaaacctaataagagtattatgaaaagaaaaaaaattacagaaaaatatatgtcatcaacatagacacaacaatccttaaataaatactagtcaaatgaatccagcagtatataaaaagaataatactttagaatcgagtaaatagagtttatcccatgagtaaaagattggtttaaaaaatgaaaattaattaatgtaattcaccacattgaaaaattaaaagacaaatcatatgatcattttaataggcatcaaaaaataatgaaactatgttgtgttaagataatgtgtcgtgccccccaaaaagacaagttgattaatgaaacagagtccagaaatagacccatatatatacaatcaattgatttacaacaaaagcaccaatacaactcaatgagaaaaataaagtcatcgccacaaatggaaggaaaaatggatatctacaaagggaaagaaatcagtctcaactcttacctaacacaatctacaaaattagtttgagatggatcactgacttcaatgtaaaagctaaatctgaagcctctataaacaaacacagcagagtgtcttgaggacactcggataagcaaaggcttcttagataggacacaaaaggcactcacatttttaaaaagactgataaattaaatatcagtaaaataaaaaacttctcataaaaagacaataaattaaaagataagccacagattaagaggaaacacttgcagtacatttatatgacaaagaacttacagaaataaaaattaaaactacaacaagatggcaccacaaatccattagaatggctaaaatttaaaagttgacattatcaagtgttggtgaagaaacaaagcagctggcaccctcacacgttgctagtagaagtgtaaaatggtgtatcttcctttggaaaactggcagtttcttgtaatgttaaacatgcatctatcctatgacccagagactcaatttctaagtatttacccaagaaaaaaaaatatatgtccacaaaatcatttgtacaaggatgttcataacagctttattcaaaataagccaaagttggaaacaacctaatggccatcaacagggtggtttgataaacaaattgtggtatatcccataatggaatattagcagcaataaaatggaagaaattattaatatatacaacaatatatacaaatatcaaaaaccttattttgaaggaaaggagctagttagaaaagtgaataccctgcatgattccattcatacaaaaattgagagcagacaagactaatctatagtgattgaagccaagatagtgatttttttatgttcaagggaggagagagcagatattgacagaaatgagcataaagaaacattccaggatagtaaaaatgttctctatgttgatatggatgacagaccattttacagtggtgcatatctctgtcagaactcactgaatgcaccctcaggatctatgcattttattgcatgtataatatacttattaaaaacattgagatgggctgccatgttagatggtatctccctgtcaacagagatactcaaacagagtctgcttgtaccaatttagggaacactaaagtttcacctgatgcctaaacagagatcatctgctgtaaccctgtaaattccctcccaacttccagtgggcagtatggcatgaaacccctgcaactcagagatggctggtttaattggagaagtgaaggatttgtattcaggctctgccaccagcagctgcacatctgagtaagttatgtaactcctagcctcatttcctcatctccgaaatagggattatgacatctacttcacagacgaactatccagattaaagaaaacgatgtttgcaaagctctgcacagggtctgacactcagcaaattctcctccaaaaatctgccaaagcactagggcccagtcaaactggtctatattctgccatcgaatgccccatcatcactgggcaatctggtctcctactgtaaataaaaaccccacctatctccatggggcacatctgccagcctcttcctaggaccctgtaggtgtggcaataaatgtggtccctggaaccagcagcaggggatttggttcctggcatctccacatacgagccacatgctcttggaagttattccaaccctgcctcaagtctctgacttttaaaatgggaaacacttttcaagataaatctgttcatcacaagaaaggatttcttataaatttgaaatatttaaaagagaattctatgcaaacgtatgcacacatacaagtgaatgtgggcccatttctctggacatgtgtctattccaaaaaaaactgtcataaactgtatcctcattttgcactcctcccaccagtgtgtcccatggtgccacctggtattgtctgcctgaaagaattctaggagggcttcatttgtctctgaagtcatagatcttcatctaccaatactgggaaaactcccttgctcctcttcctctgcattaggcttgtttttctgagacagaagtggtcagagaaaaaggacactggaatccattcattcatttaaaaatattgaccaagaaatgaactcagacgaaattgacctcttcagtgaagtcatatctaattccctcaaccctgtacaaagtaatagtacatttattcaacaacatattttcatggagtacctatttagaaaagagacggaatctgggcccagtgttataggattcaaatcccagctctgccattaattgggagtgagcattagcaagttccttcaactcaaagtatctcagtttccccaactataaaatgggaacagtaatagtaacctacctcatggggttattgtgaggaatgaattaatatctataacggttaaaattgtccttggcacataggaaatgttcagtcagtgcttgctataattattactaggagccagatactgggctaaccatattggggatacaaatgtgatttgctctaaatctatcctcaaaaaatgtacagtcttgaggagctgtttacaatctacatttgtatttagctaagataggaaagatgactatctacataattttaggggacgatccaccagcccccaaaagaaattagccttcttctcttccttgtttattgatgcctaaaattcccccataagacagcagcattacccagtaagaaaaaactgtgccttgggttcaaatggatgtaagttttgaccctggctctgctcctgatgcactgagagaccctggctgcttatatgaaacctgaatgtctatgactgcatgtaaaaaataaagatgagaagctgggcgcggtggctcatgcctgtaatcccagcactttgggaggccaaggcaggcagataggttgaggccaggagtttgagaccagcctagtcaacatggcaaaacttcgtctcttctaaaaaatacaaaaattagccaggcgtggtggcctgcacctgtagtcccagctactggggaggctgaagcaggagaatcacttgaacccaggaggtggaggttgcagtgagcggagatggtgccactacactccagcctgggtgacagagcaagacttcatctcaaaaaaaaaaaaaaaaaaaaaaaaaaaaagaaagaaagaaggaaagaaaaaagatgagaattatgcctctcaggggctgtgacaataaattgatctacgtgtgttttaaaatgcctttcacacagaatatgctacataatcactcattcctggtctcctccagaagtccctgcacttggcctctctctctcgggtgtaatggattggtccccattgaaatacatttccttttcagagtcatttatccctcagttagaaagaagtattgaccatggggaagggggactgtgaagccacctgggcatggcagagggggccaggcacagaggagggagcacaaaagaacgaacaatgaagcacatagagaaataaaacctaactcgacttgcaagccagtgatggccctatttttagctgacaagtgagtaatctgatgtgtgtgacttgaaacagggaacataaacatcaaggctgaatctataaccagccacatataacttgtactataacttattcccagaattctagactgtttgaattaagtgtctgcaggtctcttcttcacgcacttactcttattaagtttgggaactagaagcctgtgtcatttgcacaggtctcaagttacaagggaaaaagatgctttgcttggtctctggtttgactattccaaagaatctttcctaatctccaattcgtctttgtctcccaccccaccagcctccctccctccttcccttccccctgaaagctaaccatcagaggggtggaatagcctctaattcagcccattcttccctcatccctttccctttcatcatcagctagcagtgaaagtcaccatcctcttggacctcccatttctgaggcattgtctgtcccagaaccccatgcaggacattggagacaagtgaatctaacctcgtccaatctccctcttcttcccgtagataaaaacctgaactcaaagaagagaactggaataatcctcccttatcccacttcccatggtgagccccagctgggacgctgacacatggccccaacttttcctcctgcctgatgtctggacccacaggggacagatggtggtccctggtcactgaagtacccacaggtttgattattgagacttttatctctgttgactacagggaggacctgaatcagtttacatggttaaaataaaagcgccatatacaaggataaagcaggacagggcccccaccatctaaaagtagaagggatggggattgccaggcagcacctgccaccaccaagaaaagactgagaaagggacacttcaggcacaacatgtaaggaggtgctccttttgggactgaccctgcctttgcatagccctgggaatgagccaccctcatgtttgcacccaggcctctctcttgcctcatcctgcacctgccatgagtttactactgagctcacttctgaaattggctctgcattgcctgtcacctatggcaagagagaaacaactaggttatgactattgtgaactgagaaaacctataaagccaattcagagatcaaatctatcctaaaattaaattcaagcagaatttttgtgccagcggctttgaataaagactgaagaacacggtgagttatatcttcaattacagtttacaaagaacagaggtactccttccaaaaggggactcttgatttagctctctgtaaggacagaaagcataacactgaatcttgggtcagcaaaaacattttcacaagggcctcaggtatcatgagatttagctctgtttaattctgatgctcaacattaatttaaggaaaatgaagtacttgttttgggggggattaatttgctaccaggcacacctcagctgtgttttattctgaagctctaaattagcaccaggatcaacctggataatctaaatcaggggttgccaatttttttctgtaaagggccagatcataaatattttgggctttgtaagctgcacaatctctattgcaagtgctcaatgcggccattggagtgagaaaactagccacagatgatacaaaaatgaatgagcttggcctcgttccagtaaaactttccttacaaaaataggtgatggaccagatgtagcctgtaggccatagttggtcaacctctgatgtagctgacatcttgaaatgaggaaggaatgtttaatttgagaacaggtacttctacatttcacaaggtagaaatctgtaaataacaacatttggaagttccttctgtttcctgcaacactcactttagaacctaatatcatgctatttttattgctctggcttaattcagttatatagaaatcatttctattcaaatagacgatgaaatccttgaggtcaaggtctctgtccaacttctttgggtataatccatcgtgcctagcacagctgggaactttgcacttgcttaaagtgttttcttccctttctgaaggacagtgattcacatctctgcttttgacatgcaaggacttgacgatctatttaacctaaggggagaagagtctctttcaaagaatggattgtcatccccttctccctgcccctgccatgtacattatgcttctaatcagtctggaataaagcgatgtcatgggcataaactaatttcttccaatccaaaacaagttagcaagtctcattttgtaattctaaagtcttcagctcatgtatttatttcaacatttttttcctataaataaatggctgtgtgacttgtctccttctttgtgttcatatcccaatgtccagtgtagagtggccttcactaaatatgtgtagaaggaatgaggaaatgaatgcaagatgggcttagctcataaaccctttgttttgttagagacttttgccaactcttttaggcagttacaatattttgatgggcaagacctgtgctgttgggctgcctggtcaaacccatgcatagtgaaataatccgtctccaatctcagcctgcatcctaaccccaatttgtccctgagtgcaaggtcactgatctgaatttgaatggcaggctttgttgacctaacaactctgttaggctcacccatttctgcatactactggtgagtgacagaggatggacactgaaatctccatcttttcatagaacccatgcaagaggcacaaaaccatctgcttagtggtcatgtggcagcagacagtatctcagaagtcctcgcagcatatgacttcactgatgaagatggatcacacttgagcagggattcttgatctctgcaaaacagctcatacacaacaggaacaatctcacagataagaaaaactccagaagttggtctcgggctatgaaaatttctgccacaatatgatttatatgaaaataaataaagtgggtctactactttatcattagcaataagtggattctttcttcctgccacagacaaactgaggatgtaaatgaacaccatactcgcattgttgcttatgctgttgttcttcacccactgcctgaggtgtaggtttgcaaataaaatcaaaccatcattattctggactgattatccaattagagaatgaaataggccagccctgtcttccttcttcttccatcaaatgccattcttgtagccatttcactgacaacatgaggggccaacagaagaaataaacaggcataaatttcaaacccaggaaatttatgtgagcaaagggaaagaatccagatatataaaatgaattaatcatcaataagtcaccacatccctattacatggtaagttcttttctgggagctgttagggccagaaagggactgtaagacacagtccctgctttaaagaagtacaaacaatcaccaaaaataaaagcaaaactgaaaaacagcaaataaataatcatttatcagaaccaactatggactatggatagtttaaaagtgctgagagcatagcccacatggcagaagtgcataaataatgcaaaaccttacattggctgacaatttaaacttcccttcatgatcattcttctgtcagaaccgctgagagagataaagaagataataataacaaaagaacttcaagtttctggtgattctaagtaggttctagtttcaggagtattccaacacactatgttaccttagacaagtcatgttctctctttgtgattaggtttctcatcaaaaggaaggaaagaaggaagggaggaagaagggactgggagtgttggtaatagataacccttaatatcccattcagatcaaatttctataattataatgtggctctctgcctctggaggtcactcagtaacaaagaaatataactttaaaaatagccaaagtaggaaaaataacaatcattctcataaatctgcagtttctttctttctttctctctctctcttttcttctctctctcttctcttccttcctttctttcttctttctttctttcttttcttttctttctttctttcctttctttctttccctgtctctctctctctctttctttctttccttctttctttctctttcttcctttctgatggagtcttgctctgtcaccaggtgggagtgcagtggtgccagatcagctcactgcaacctccacctcctgggttcaagtgattcccgggcctcagcctccccaagtagctagggactcaggtgagagtcaccaggcccagctaatttttgtatttttagtagagatggagtttcaccatgttggtcaggatggtctcgatctcttgaccttgtgatctgcccccccttgcccttctgaagtgctgggattacaggcatgagccaccacacctggccataaatctgcagtttctacagctactttgcaactatgaacaaatgctagtgtacacagaaaactccctccctcctgtaagcttcttatgcatgccacagactctggcctcccagctgggccagatacatttgaatgctggagcactcagctgattaagatacctaatttctgaatgatcccactcacaccaggaggacagtgtttagagcaagatgttacatctcagttgactcaccttgtgcaatgatttctttttataaatgctaattgcaactcactaattaagagagatgttacactgggcaggaaaatcattgagtcaggaaatcttgcaattttctctagcatatttcatgaatcaaaagtcttgatctgatgcagttttttcatggcctagagggcagaataggagctgaataccacagcttctcttcataagggtggtatggaaatggactcccagtttaaaagagagtcaaatgtccatcctgggagaattagcagagtattgtggttaagggcagaggctttgaagacaggcctggactaatttatttttgcctatggtttaggacagagggtccaagactgtctttttcatcttgtcatctcagcatttaggatagcaaggggtacatagcaggtgctaaataaatgtgttgtgaaatttaagtcctggttctaccatgcataagctgtttcctagggcaccttccataacctcttggagactcttctgtttttttgcttttgtgtgtgtgtgtgtgtgtgtgtgtgtgtgttgttgctgttgtcattattttgtaaaatgggatgtctcagttggggttcctctgcaggagaacctgagaaaaggatttgattacaaatagttaacttgggaagtgatctcaggaaacaccagtaagggaacaggaaagtggggaggagatgggaaagcatccataaagagtttgttatcaagcatttatcactgtgggcaactaaaggaaaatcccactggggtactctggcagccaggatctacacatggctttatgtgtaaacagaagagccttgcgaccaaggggtgagggggctggggcattgatccaacacctcctgttggtcactggttgaggaggcattaagtccctagcacttacgacctgtagacaggcccacaagcaagcttcagtgactggagaaagtcctctggcaaagaaatgcagatgctggcaattcaaaatctagccacctgcactacaggtaagggcaagcgggtctgggttgcggtgacaggcaccaacagggccagcctcccaggaataataaaacctatgtcttaggttgatgtgaggcttaaatgaagcggcggatggaaaggactgattgcgaccctgcacactgtacctccattcactgagggcttcctgctgtcatgagaacatggaaaatgtggcgctccccactaaggcccctggagccatgcatcaggtagaatacagtctcaagggcatcttgagaccttatagatccagagaaatgccacttcctagccttggaaactgacaatgcacattagcatatggaaggctctgaggattcttatggttaagaaactctttaattaaatgaggatttcccaaacttactggagcacagagttctctttccaaataatgtatgccaactttcagtgtaatccaacactccatgaagcacattttgggaaaagaaggcctgagactggtgaattttacccagaaaagcattccataatttccagctcacccccaaaattctgctgacaaatatgtttccttaactacacccaaatcttctgatttcatcttctttttttctttttctttttgttttttgagacaaggtctggccctattgcccaggctggagtccagtggcaccatcttggctcactgcaacctcagtctccagggctcaaaggatcctttcacctcagcgtcctgcatagctgggactacaggcatgcacctctacatccagctaattttttgtattttttctagagatgggtttcaccatgttgcccaggctggtctcaaactcacaagctcaagcaccttggcctcccaaagtgctggattacaggcatgagccaccatgcccagcctcacctccttttttaatgaacccaaacccaccctgatgatttttttattctgcatttctcagattcataatggttttcacgtgtgatttgaaatcatttatgggagctgcatgagcaacttacatcctggagtttacaggtgttgcaccctgcccaaagttgctgagtgctcaccaagtcctgcttctctcagaggcagcattacctaatggacaggagtctccgggcccagctctgttgcttattaactttcccaacgtcatttgtaaaatgagaaaatgtctgttgttcacaggtgatatagttaggctctgtgtccccatccaaaatctcatcttgaattgtaatccctataatctccacctgtcaagggtgggaccaggtggaggtaattggatcacgggggcggtttccctcatgcttttctcgtgatagtgagtaagtctcaagaaagctgatggttttataagcatctggcatttcccctgcttgaactcactctgtcctgccaccctgtgaagaaggtgccttcttctcctttgccttccaccgtgattgtaagtttcctgaggcctccccaggcatgcggaactgtgagtcaattcaacctctttcctttataaattacccggtctggaggattccttcatagtagtgtaagaatggactaataccacaggttactatagaaattaaatgaattacagcacaaaacatccagcactgtgcagccaccaactaatgctcaatgaatgtcgcttgcctttcaaatttcttcctctaaccacccctagccctgattccaattcttcattacttagataattgtcatataaagagaaaatagaatgatgaaatggaaagactgttgcctgaataattcaggccacttagtgagtatctatatccatatagacagctgtgtagctacctctctacaggtaggtaccttaatatgcaatgtccatctgtatctatatagagatacagatatatagaggcagagatatttcatgcaataaatatttattaagcacctgctggtgcctggcattgctctgtgttggatgaaaatactgaataagacagacatgatccctgctcacaagtaggttacggcctagtagtacagacaagtcacatcaagaaacaactaaacaatgaagcaaacaaacaactaattacaaattgcttcaagcaaatgcttgtataaattgctataaaacacacaaattccagtgagggacactttagactgtgtggccacagaggcctttctaatgaggtgatagatcagtggagaactgaagggagagagtgggccatcaggggacgcaggggcaagtgccatccaaaggagcgggttgctgcctgccattgctgaggcagggagaagaagcctggggggtgcaggagaaggcagaagctctaaggccatggcaggctttatgggccgtaaggaggtcttggtttccatctaagaagaaggaaaaagtttaaagaggtgggccacaaaagcagattgaaaaagggttgacattttaaaagatccctgcaaacaactaaagaaaggagatgactgtgagattctcagagaattctttcctgcctgctattgatctccaaaaagtgtgattctataacaagagcaaacattgacagtgagtcagatacctctgtaatcatttttaaatcactcattttattcccacaacaccttacatgcggtggccatggttgtccccattttacagatgtggcagcagttgaggcacagagagcttaaacatcttgccgaagctcacctagcaatgagatgatggagccgcggttgaaatttaggcagtggaactccagatgtgtgctcaccctgccctgttctgcctccctggaagcacgctcagccatggctctggctgcctctcccatgctgcccccgagatttcattccctgtatgcctgaacgtcaacacaagtgtctttcttctcagtcccatggaaacggttcctccaccattacgatctgaactaaaacaataagaagatgctatgcaaaaaatgaacctgggtgagtactgaacactttaaaatgcaagactttactaaggctaaatagaattgaaagctatagcctcagaagagaatgtcacaaaaccctgacacagtgaaacaattacataactaagaagtgaggggaaaggatgggggagaaaatgaaatgtcattttctcttctttcacagcagaaagttcatctgttttacaccaaattaaaaaacaaagttggccgggcatggtggctcacgcctgtaatcccagcactttgggaggccaaggtgggtggatcacgaggttaggagatcgagaccatcctggctaacagggtgaaactccgtctgtactaaaaatacaaaaaaattagccaggcacggtggcaggcacctgtagtcccagctacttgggagactgaggcaggagaatggcatgaacctgggaggcagagtttgcagtgagccaagatcacaccactgcactccagcctgggtgacagagcgagactccatcttaaaaaaaaaaaaaaaaaaaaaaaaaaaagttaaatgaaaacatgactctaccttcatcttttctcctaattgctttctcatattcatatcagcatgtcttaggaggtaaaagttacaaagtttagcgattgcttcatttttctccaatttttctacattcaagtgaaatcacctttgcaaaattatgacaacaagagaaatctgacagagctgactccctcttgcttccaacttccaagctacccttagtcattcctgggcataggccaagctaactttgggaggaatttatagtttaacctttaagcaaggacagtaatagcccttcccaaaactaaattgtccttgtaaaactaacgaaaggccataaggttagggttataagaggtgcctgaattctgctaacacataagcgcagttaaatgataaccagccattgttctggaggtcacagatttgtaacttcctcaattactcttgtaaataacatcactactgtagaactgaagactggccctgggagatgtttttcagacttctggcatttctggcgagtgactgaccccacctggacccaagactcatgactcagccagtcctgtggtccccacccagaggactcaacacgagtggactgttttccatacgcttgtggttttacccccaagcaatcaacattccctgttccctagccccctgcccaccaaaccatcctgaaaaactcctaacctcctagcctttggggagactgatttgaaggataaccctagtcctccagggtggccagactcacattaattaaactctttctttacagcaatactgccatctcactgaattacttttgtctgtgcagcagacagggaaaatccactgggtgactacacaaataagcttaaacttaacagttttattttttaaaaaaacatgtaggccaggcacagtggctcatgcctataaccccagcactatgggaggctgaggcaggcgggtcccgaggtcaggaattcaaaaccatcctggccaacatggtgaaaccctgtctctgctaaaaaatacaaaaaattagccgggcatggtggcaagtgcctgtaatcccagctactcgggaggctagtacaagttcattttatataaatttctgtttgtctaacttatttacttatctactgtacagaaaaatatctagaatgatctttatccaatgtgatcaaatgttttatgatatttgctttggtttgttggacacattcttcttggcattttctgtgttgcttccatttctcttaaatgaatatgttgagttttttaaataataaaataattattttgaaaatacataaggaagacgtccagacttgctttacttgatcatatgaaataaactcctcttcacgctggagcaaaataagagcactcttatcttgggggttttggaagtatttctgtggtttctgggatgcaatatctcagccagaaaaataagcccttcatcctgccttcagcgaggcgagccccacagcaagggccaaagtctaggaggcctgagcatgaggctgcagtgtctccaagccccactgcctttaatgggaacagcgtcctggcaccctctccaggatcacagcagtgagctctgtcctctggtcacctgcgccaccaacaccctgacaaggtcctcctcctccttagcgatgggctgcctcctttcccacagcttctggtgcccccatgggttgggggcagggagggaagtagcaaagaattaagaatcagatccagagaagcatgtggtcatatcaaagaaggagtgtaaatagctcctatacaatgaggtgatcagatctctaagaggctcagggaaaataatcaggaataagtggaaagacagaaatgaaactgaacaaaagaaaacacttttagggagaaggaagtttgaggcaggtcatcatcctcaagaatcttctttgaggcaaaagagctgtatgccatgaggagaaaatgatacaggcagagcaagagaaaaataatgacctagtcattggctcaagattaaaagctataatagaccctttgatcctcacagtaactcctttaggtagtgaaggcaagagctcatctccttattataggtgagggtgataggattcagagactatagcttgttgctcaaggtcaagcagactggtgcaggtgcagcctggaccacaaggaggtctctggacctgatcactcggccatgggagtctcctctctctccccttcccccttttcatggaagtgagagttgtgtgaatctgatattccccatagtccccccctccatgattcctagtttgctcccagctcctctcccctctctagctccataactggggtcaaagccaggctaacttgagaagctgagtggaaatctcatttttggcttgctaagaagttgtcttgagacccctttgtttcatagggaggaaggtttcccagcagaggttaagttttgtgctcaggtttaaggcatgagtcaaggtcaagcttcggtagttgcccaggttttatttcaagggaagaaggagttcaaggtgatagctctctttgagggagggaggaagggaggactgtgtagttgtggatatggtagcctggccagccaatgcgtaagtgtaataagtaatcctcatactctcaccccatgctgcaagaactgtggtaataaccttgagcaacggcacacccttcctcctaacaacacaggtttaggctaaagacattatccattaaaaataaccacattttataaactttgtgttgtgtgagttttttccccattcttttttgaagcaactggcttggtacataaattacactgtgtgctagagaatatatgacacggctgtgaattacaaggtcataattttaccagcaattttagatgctgccataaaccatccaatgtctgagagagctctaatacattttgatttttttcctaagcccccagaatggcattctaggccagctcttaaaagatgcttcatttcttgcttttgttttaggaaaacaatagccaagtaacatcatccgctcctttctttcttttcttccctatagtatcgttgccttttatttttttgttaaattactagcatctatcttagatagatgttccctcagccttcttatgggaaagatgggcttatgtagggctttgagtgagcaaagttcccagagccacaccattttggcccagggcttgcctaaagacataacgaagtgaccttggaccaggtggttctgttcagtctcaggtggaaatgttttccctggtcttctgtccttaccttcttctccacttcaacttaagttacacctacatccttgcttttcccctaattttcaggcctttgttcatttgcaaacacttgccctcagtttgacctgcctattcccccctcctgtagctaacaaatttctacttcagactccaggaaccagccagaacaccacctccttttggaaagtcttccctgggacacgtcaggctgtctcttttctgcctgttcccccagcactctcctgccatattcaatgcaacacactggaattctttacttacttccttctcccccatgaatgagctcaccagcccttgtcccttttcttttgttcattcattcatgtctaaattcacaaaacattcattgagggttccttttagtaacttcagtaagacttgacacagtgcctagaatgtggtaatgggaatgtctgttgaatgaaacaaaatgagctaaaaagaaataagtggatggaggtggatgaatcccaactactgtgcatctgcaggacacggtcaaagagaaggtccctaacagggtaactgggaaggctctcctcctgttcccctgctcttctccaagggtgtcaacggagtaagtcctgccccagagtaaatccactccagttactataaccacgcactgaggatccctcagctgcctccctatatgatcactctgaaatattcacaccagtccacttcctggctccccaaagaaggatgcaaattcctccccctgctcacctttttctcttgtctggaatgctcttggccctccactccacttagttaaggcttttccatgttttaagactcaactcaagtccagctcccccagcaagtccctatggctacaggcacatctgcctacttttaacttatagcatatactacatgtggttcctaatcagaacataactcatcccatctgaatacaggcctaactaattggcgtgcactgagggagcaggggcagaccatagttctcactgctgagggggaatgtgactggttaaaagacctctaagtctagcccaggctatgctatttactacttgtgtgacactgcagacctcttggaacatccttgcccatatctgccaattcagagataacaataacatccatctcacagagtttatcaaatacagtaatgcttacaaaaggttttcacatagttgaacagctgtggaaatgtcatgtcttataaatgcacctaagtaaactcaggcaaccctaataggccctggttttgttagtcattgaggccactccttccatatgttatgttcccttggcactgagcttcctttcaaattaagaattgaattgattcatgcaggtgactcaacaactcataatttagatctgctttcactctcaccatgaaatacacacagacagctgacaccatgctcttgacttacgagcctatttttctaaaaggcccagtccctccaaggctctttcatccactcaatatggtcagccacaggcttggtttgaactgcctgttgatagaaacattgtctgtcggctccatggtccttgaccacatgacagccttcaaggacagatgtgggataaggaaataaataacagctgttttactgacacttgtactcattcattcaggccaaggtgagaaggatgggtaggattcttcatatggactcactggtatatcctagtgagttttgtttaagagacagggtctctgtgtttgtcacccaggctggggtacagcggcatgattatggctctgagcagcctcaacctctttgcctcaagcgatcctcctgcctcagcttcccaagtagttaggactacaggcataagccaccacgcccaactactttttttttttgtagggatggggtctcactatgttgcccaagctggtcttcaacccctgggctcaagcaatcttcctgccctggcctcccaagctgctgagattacaggtgtgagccaccatgcctgatggagttttaatagtagttactgcattgcaccagccagatatttcatctgagaaaagtcaggcacactaggttccatcattcaattactatcctattaagctgaattcagttatgagtgtgtttagagatgtgcatgtatcttgtagtcaacgcatggataacatgtgaattctatccaaagcaataagtgctctgcatacatttaaatgcatgtcttctcatgtttactcttctgtagtattatttaactatttattcatcttttgttatattgacttatgaaagactttgaactcttgttgtagaaaaggtatttggaattcccatatctataactagattaagctactctaggctgaaattgtgtcttacatttcacagtataccatgcacaacaagcagagtgctatgatccatatgtatctattgagtgaatcatttattaatctcaaattacatccccaaatcctgttctttccttcctttgcctttttttcctagatatcaagaagcacactgattctagttaagtagttattactttgagctcagttaaagatactaaatattggcactcttggtggcccccattccaagcatccttttatgtaaaagaactgtaatcctatgagcaaagacctgtaaaactgactgcagctaagggaattatgcccccatgcagataatgctgtggaccaaacagttccgataagcaaacaaaatctctcagacaattatgttcttgtttaaggccgtttgccttggaattcccaaaaggattctggaggattgcaaatttgctggggatgaagaaagaaagtactagctagagtttaatagattattggattaagacaggccagaaacagtcaaacaagaaaagtattatgcaaaaccttctaaggttctaatctcaccttatttctattttgattaatattttcctgggaaagaaaagatgggggtttttgttgttctctgactacaatccagagataacatctttgcctccagttttcatcaagataaagacctggaagacccgagccaaaaggaaggagctggaattttttttaaatctttctttctggtctttaaggaagttatctgaaaacccactggtactctccaatgggtaaagaatgagacagaactagcagaaagtgttaaagcattagacaggcaaattaacttagagacagtgggagaatgattccatctccattgattttccagtctgtaaatatgaaatgctggaaggatacttgtgacatttggaaagttttatctagaaatctccaattaattttagagtgcatagcatacatcaattaaacagactgcggggttcatatttcctacacggtcgtgactcatcctcggaagatctgacccatcaaggataatgatttcatcttgatattggtgactaatatttctgtttgtatgtccagtgtctgctacagagcctgacatagagtaagtaaatgctcaaacatatggataaatgaatcaattaaaaacctcataaaatctttaccctattaatcttcctcctatagcaggggttggtaaactacagcctgtgagacaaatctggccaccaccagttcttgcacaggacaccagctaaaaatgttttccccctacattttaaaacagctaaaaaaattagaatattttatggaatatgaaaattgtatgaaattcaaatttcagtgtcccgaatacaattttattgggacacagctatgtccactcttttacctattgcctatggctgctttcatgccacagaggcagagttgaatggtggtggtggagatcatacagcccctgaagccaaaaacattgactatcaggccctttatggaagaattttgctgacccttattctatagaatggaacttgggaacccttatcatttgtcattcattccattgttcactcagtggctatttactgagtatctcccatgcgtgcagtgctctgtcccattctggggataaaacagagagctgagaaagatccctgccttgatggaactcacagtctgggtctggagcagcagaaagaggctcatcaagtaaccttccaagcacctttgcaatcacaacagtgaggagagctaagaaatggtacatggggtaagcttccatgatgtactgatggttatgctaattactaaagactgtcaaatcaggacccaaattgtctagtgccaaggtggatgtctttgctccttcctttttctgccctgagacactcttcattctcagttgggtttcccttttagaatgacctgtgacatgtgtcttctcctcatgtgacactcttcctctttctaaccccagcacctagaacaaagcctgacacacgggagacactcagggcatcactgttgaacaaatgaaagaattaattcattaggagaagaaatgtaagcaaattcctgggcatccccaggccccagttttctcatcagtagaataagaaggatatgatgtactcaagcctcccagctcggcattctgcaatttgtcatgtcctgagagctggactcatctggctttctgattcactcctctctgtggacataaggcagactccctctgactcagcagcctgatgcatcttcctgagtgacacatgaactctgcccaaggcaaggcggccagccccaatccattccacggatcactgctgacagtgaatgggagtatacctgggggttttagccaaggtctgctcaaggtctttggcataaagggaggccaggttgaacacacaccagcaggaagagagatgaccttgacttcataaattggccataaattagagctaagaatcaggaagattctccttccatgcacatttctaaatggcagtttcaaggcaggtggctattttaaaacacagacacaaactcataattcaccctctttgtcccccaccctcctacatgccattgatctttcttttttttttttggaatcctgaaacatgatctttaagaaaagacaactggactccaggattacttcctagctcttcctcctctagaagccaccatttctcttcgctatctagaccccagggaagtggctttggcaaaagcacatttgcacccatggatcatttggttttcttgtcctgttaactgcctggttctgcagcacccagagccagataatagaggtgttccttcaccagccacagctactatcaggatccctcttagtccggaggtaacagaagcaactggttgaacgtgtttcctcctgggaaatcctaaatgttccatatggcaatagggaatctagagttgtgtttctccttgtattagggatattttccctctttcagtttcttcccattttttcccatctaaaatatgttttttccactttgctgagatgaagaccagccagagagtcaaaggaaatgacagacatgccataatagaaagaaaaaaatacagacttctgaagaatgagttgattcatgccatgaaaactcacgataaaaatattcactacttttttttggccacttgtcatagtgtgctgcctctgctaggcagctgaaagtgtctcatatgaaaagctctattatcctccacagaaatgacctttgggacccacccaacggtagtcaatggtaatattatactaacttgccccccaagaggaaagaatgaaataataatacttaaaatatgaatgcagagaagtcctcacttaaacacagtacttctggttcataaatcagttctgacacattgaagtacacatatgatgactagacgcaagtttattaacacattttctttctttttaggtctgagaaacatatctattcagaatccatacatttgttcattttttgaagctgacagcttgataggcaaaaagtaaagtgacagatcatttcaatatttcttttaaattcaaaaccaattcagtcaaaagaccgaaggaaaatattctacggagataaaatgataatgcaaacaattgaagacagtcctttattttagtgaaaacaggtaatgtctgtactctggagtcgggctgacttcctcctcttaacctgccctgcaagtccaattagaatggttttctgcggggagttgttttccatttatacttagcccgaacacgtatacctacttttcaaactcttagctattcacttgacatttgtcttcttcagtcttcactaaatagtctttggaccctttgggagtcttataagagttattttctgaaagttaaaaacgtaggaccttatttcggcagaggttaactaaaccaggcttcaaagaggattctgagggcgacagccactataatgtccattcctactttccttcactaggtggcagcacgtcacaacacatttttcagaacagtctggggaaaatgcagttgagctaaagtgaggttggggagtctctgcgggctatgggaggaggatacacattagggcaggtcagtgcatggaaaagctggcgacacttgtgtttcctataggtcccctttgttcccagtggagctggggcccttcgtctctaacaaaccagaagtacttgtactaatggaagggaggctatttatttcataaaataaatataaacaaacaagaaaattgaaataagaagtcctctgaccatgtgcacgttgctccagacaccaaaacatgagaaagcacttctgacccagtttgtaaattcgagttatagtattttacgtttgctaaaatattcacctaccacagtaagaatttttgtttatctgatgcaacctgtttggtgttataggcagatgctaagttacaggctttgtggtggatactgggcaacagatgtggtaagaaggggagcagcccaagatgaaatttcctccaaaacaccagaggttcctgtctcaagcagagaaatcataatactgcaacacatactagtttgcaaagggcaagtcgctatggccaaaaatgattgattcagaggaagaggaagggaaggaagaagaaagagaggaagaggaggggaaggacatggaggagggaaaagaaaaggagaaggagggagagggagaggagaaggaggaagaggatgaagaggaagaagaaaagaaggaggggaggaggagttttaactgaatactgtatttttgccttaatgtaggaaagatgaaggggagaaggaggtaactgctagtggacattgagaagctgtcaatacagcaagaccttgccaaaggttgatcaatagcctctttttaaaattaatacatagtagatggatgtattttcagtgtctatgtgataatttgatacatccatattgtcaaactagggtaactgggacatccatcaccttaaaatatttatcttttctacatgctaggaacattgaaattattcttttgtagctattttgaaatgtacaattgattcatgttaacttgtcaccctaatgttaactggtcaccctactgatctatcaaacaccaagtcttatttcttctatctaagtgtatatttattcccattaatcaacctctcttcatcctcccctccttcctacccttccctgcctcagataactaccaatctactctctatcttcatgagatccccttttttttagctcccacatgtgaatgagaacacgcaatatttgtctttctgtgcttggattatttcacttaacacaacgacctccagttccatccacggtgccacaaatgacagggtttcattctttttcatggaacagccttcctttgaagagagacattcactctcctgctagagacagcctccacctggcctgcttcacccatttgttatcttcttgtccctgtaagcatttgtgtttgcaatctggggtttatagattcatctttcctatagtagggctaaaatatcttagtttaaactccaagcctaggacaacagctggcacattacacttgttttaaggtttgttgagtgaatgatgataataataaagatgatgataataatgaaaccggcaatatttatgaagtttcttaaccagggcagagactagggtaagacagtgatgcatccagggaacaaaattgaaaggcacgctcattttctttttctttctttcttttttttttttaattttgagacaggggctgactctgtccccaggctggagtgcaatggcatgatcttgtctcactgcagcctcgacttcctcgagcaatccttccacctcagcccccaaatagcaggaacttcaaacatgcagcatcatgtctggctaatttttgtattttttgtagagatggggtctcaccatgttgcccaggctggtctcaaactccaggactcaagcgatcctcccacctcagcttcccaaattgctgggattacaggcatgagctgctgcacccagctgaggccctcgctttcagggtcacttgcttcatcttgctcctagcctatttataacataggccagttttctttacatgatttatctcattggtagggcttttaaacatttctgtctctcatcacatgtatgagttactactaaaccgtgggtatatagtagtaattaaaagctcaggcgctgagatcacaaagatgtgagttcgaattcttgctgtatcacttgctgaagtcatacagcaagtaagacaggtcacacaggtcacctctccaagttccaagttcctctacctgtgtgttaggattaaatgagataggccggtaaagagctttgtccaatacctgccacaaaatatagtcatgcattgcttaatgacagggatgtgtcattaggcaattttgtcattgagcaaacatcataaagtacacttagacaaacctagattgtatagcctcctacacacctaggctatatggtatagcctattgctcctaagctacaaatttgtacagcattactgtactgaatactgcaagcaactgtaacacaatggtaagttttgtgcatctaaacatataaaagatacagtaaaaatacatattataagcttatgggaccaccattgcatatgggaattgttgctgacagaaacattatgtagcaggactgtacatagcagctataataataataacaataacaagagcaaaaataacttattttattcctattacatttataaggatttcagagaaaaattcatgttcaggtcatcaaaattgattagtagctattgtatgcaaaacatagtgccagacatttagaggaatataaaagaatatataacatagctgcaaatctagaccagggatcagcaaactttctctaaaaagaaagataataattttttaaggcttttttgggtcctatcttcttcatgtcattgccataaacaatatgtgaacgaatgaacatggctatgttccaagaaaactttatttacaaaaacaggcagtaggccagagtggctaactcctgatctagttgatgagtcaggacaggtacatgttacttataaaaacacaaccacatcagaagatcacccatgatcaaaagagtggctcagactatagtggttttggaagaggcaagtaacaggataataactggttgagtgcaggtaagcagagaagacaagaaagcagctgctagacaagaaactaccaaaaccatggcgatggaacatatctgagattgggtaggagtggttggtaagtaggctggctagagtgaaaatgggagaaattcacaaaaatgcaaacagggctggagaagaaggctaggtgagaatataaagaaggaagaccatgagactgagttttttgtttgtttaatttaatttaattttttatttttattttttttttaagatgggatttcactgtattgcccaggctggagtacagtagcacaaccacagctcactgtagcttcaacctccaaggctcaagcaatcctcccacctcagcctcctgagtagctgggaccacaggtatgtgccaccatgccgggctaattttttaaaaaaatttttgtagagacagggtctcactgtgttgcctaggctggcctcaaacgatcctcttgccttgggctctcaaagtgctgggattacaggagtgagccaccacactcagccaagtttttacaaaaaggaagtatctgctgtgctcccaatctggccagtgaggtttgcaatccactcaggaaataataagctaattttaccctttatgagctgggttgctaaattcctacctggccttaaaggggtaagtcgaatttagtgattgtgatatgggagcaaagtgtcaccacactagtgtttggcatttatttcgagtgatatagtgtgtcttatgaaaaatgggccaggcacagtggctcacacctgtatcccagtactttgggagaccgaggtgggcagatcacttgaggtcaggtgttcaagaccagcctgtccaacatggtgaaaccccatctctactaaaaatacaaaaattagctgggcgtggtggtgggcacctgtaatcccagctacttgggaggctgaggcaggagaatcacttgaacccaggaggcggaggttgcagtgagccaagattgtgccactgcactccagcctgggcaacaatgcaagacccaatctaaaaaataataataaaaataaatttaaaaaaaagaaaaatggagctctgctcaccacctatcatctgttcttactctcatgagcaggcttgggcccaggcctgggcatctcagtgtctgcaagtgagatgactgggaaagaagatttgttcaaataagtcaccctgctattggagagaggctggaccctaagagagcccttccctcgaggagcgggctgagatactgtatccctgggagaaggttggaggtgaggctccatccctgggagaaggtcggaggtgaggctccatccctgggagaaggtcagaggtgaggctccatccctgggagaaggtcagaggtgaggctccatccctgggagaaggtcagaggtgaggctccatccctgggagaacatcggaggtgagactctagggatgagttagaaatttggcctgggacctccctccgcccctctccttccctaatctccaacacaccctgtatctattttcctgaatgagttgaccctatcctaatttcagagagtttaggaagcgatatcaaccaaattggctctagacaaaatactagtgactaataaagtcaagcaaaggtgctcattcttactagtaaccaaggacttggaataccttagaaggggattacaagtggaagatccaagagctatgggaaaagggttctgctgttcaagttgaaattgtaatatggaatatcataggatgagtatatctcaagatgtaaatgactcagattttaatctcaaaaacatatgaaataaaggattacattaataagaatactgatatttaggagcacaaaatagcaaggtttactctaataccagaatcctggaaacttgcatagcagctacaactagaattcaagttcagcctcaccgtgggctggaccagcagatctcaaagtgtggcccccagatcagcagcagcagcatcacttgggaatgtgttagccatgcagatcctcaggccccatcccaggtgtactgaatctgaaactctggggatggaacaccccaaatctgtaatttaaccagacctctaggtgactctggtgcactcaaagtttgagaaccactggtctatctagaatacatagtgtgcttgttccaaagcaattgtccttaccacgacccaaagagcctcacagaatagatttcggaaagtacgtgtgcgtgtgtgtgtgtgcgtgtgtgtgtgtgtgtgtgtgtgtgtgtgtgtgtgtgtgtgttgaagtttctcaggtattcaggtatgttcctctggtttaagaaccaccactgtgccaggcctctcaacagtggctgcacaagtgaaattattcagagaacttgaaaacattctggtgactgagttcatccccaattctcatatgcttggttagaaatacagtctggccaggaggacgtgtcagagttcctgggtgattctaacatactgccaagatcatttagcccatagaagaatcaccaggagaatttgttaaaacagattcctcagccctacctttcagagattctccaggtttagggttgaactccaacatttttatttctattaagctcccaggccatgtgctggcttgcagaccgcacctcgagtagtcctgctctaggagaaacatgtttatattttagatacctgaaatcttctttgggctgggatggccaactttcctccatctgttcctcctctaaattcctataaacttactgttctttctagaggacactccaattaagttattaacatcttatagaggcaagatctatgttttccccatctttgggtcactcctagcacctagggatttgcacacagtaggtgttcagctgaataatgcagtcgaatccctgagctggtttcaggtgttcattttctccctatctgatctgctagccaggtcaatccattatggccctggtctcatggaaaagaatcaaggcatctattttttgaagatgatgtgaaggtaaatatacgtccagtcctagagatttaggttgctgaggaggctgttccaataataccccagatgaagtacagccatctggagaggttttggcatccatgcaaacctactgctgaattcgttccttgaagacattcattttaggatggtatttccaatttggcatataacagagccatgcaaatcaatgaggatttagaatctctacttacggagggcatcttatttaaagcgtgtccctgacaaagcaatatcaagggaacacaattggaaatctcttggagaggagtaatttctctagaagcagttttagctatagcagcgaccggaacagcaatgagctccctgaaatacatccaaatttttagtattccacttggctgggctgccttcttcagagcccaatcatagggacagaacttaataatgagttcatttttcttgtcacactagagcaattcagttgcaatgctattcataaggtgtatgttgccattgaattctttctcaaaaaaaaacaaaaaaaaaaaagctcaagccaagagtagagccccatgtcagtctatatgcgctaacaaaataccttagactgggtaatttataaacaacagcaattgattgctcacagttctaaaggccggaatgtcccagatcaaggcgacaacagattcagcatctggggagggttttttctctgctccatagatggcactttcttgtttccctgcatggtgggagggacaaacagcctcccaagggcttctttcataagggcaccaataccattcctgagggctccaccctcatgatctaatcatctcccagaggccccatctccaacacgacggcattgggatttcatttcaacacatacatttggggcagatacaaacattcagaccatagcagcccataacatctagcatgatactatttcaacatggactaatggtaaaaacatggattgtttttatttatttggctacttgtatagaatgggtcaagaagctcagaagaggggactggtgaacatgggggaaaaaagtagtttggaggctggtaagttattaaaaatgtgttaacttgtagcttgagagacagcatagtatcatatcaagtaacatggactttggaggtagattgcctgagatcaaagctgagctctaccatttactcactaggtgactctcagcaatttatttaaccttctgaagcctcagtttccccatctgtaatatgggcccccaaatgacacctatttcatagtactgtttggaagagcacttgagacaattatatactgtatgtacatacacatacatacatatatatacacatatatgtaatatgtgtaatatgaacacatctaactttattctagttatggaagcacttttcttttggatttctctttctctcaaaccccccaacccccactctcctaaggacacctggcccaaaaagggaaatcatactttttcttttctttatttcactattcttattctaaagaaacccacagactacagacagcagtttacttagaaggctctgggcttcagggaatctagatgtccaagttgaaagtcagctgcctggaacatggagtgggtgacctctgggggcactcaggggcccttccttccaggcttcgggcactgtcactgagaagcaactcccttgggggaggggtgcttttggtcatagcggttgagtcaagttatcagatgtcaaatagcttataggagttcaaagtgagcctatctccaccactgctaaccacgaactgcccatctgagcatgatgaaattggcccccttcccctctccccttgctacttaattgctcacaaatccagcaaattgcaggaccagcctctagggggcaccagagacctttcctttcagagcccaaaatgccatttcagtagcagcagagtagtgtgtcctggagctggagcatggtccagtgtctcttgtgctttttggcctactgagtccttaagtatatttaatttaatttgggtagggtggtagagggttccttttaacagtgtattcatgatttctctagcatttcttcaggaaagttatttatttcttttagatatagaatttttaccattggtccattcactcaaaatcacttcaaaaaacatttgctaagcttccactatgtgcaagagtgtcctgggcatacaaaaagtaaaaagccatggtgtgtgctgtcacagactcattctagagcagcgtggtcccacagaactgtctatgatgatggaatgttccacatctgtgctgtccagctccgcagccaatgagccacatggggctcttgagtacctgaaaaacagctggtaggatggaggaactgagcttttaaataggcaaatgtggctaggagctaccatactggacagcacagtgtattagtttggtgcaaaagtaattgtggttttggccatttttaagtggattggtaagcctggctatttaaagtgtggtccacagagcaggagaatcactacacctgagagctggtggaaatgtagatctctgacgttagcataggcttcctaaatcagaaactgcattctaacaagatctcctggtgcttctcatgcacagtaaagtttagaaagttaggagatgcatacaagtggttctcatcctgactgcacttcagacacaactgagaaacattaaaagaagctgagcctaggtcacaccctccacccagagattcttaggttaatggtttaaaggcttggcctgaacatgaagagttttaaaagcactctgggggattctaataaaaattcgagaaccatcccagcataagtcagtacggtggctccaaaactggagatcaccaggagtgcttgttaaaacacagactgctggctccaactcgcggtttctgatccctgggtctcggttgagctctaagaaccctcatgtgtaacaagtccccagtaacgctgatgctgctgatccaggaaccacactttgagaaccactggtctaatcattttaaaagatgggctccagaattggactaacctgagtcttggacctgccacttacttagaccctgaacctcagtttcccaaactgtaaacttgggctatgaatatttactcatcgagttattgtgaatattaactcagagaatgactgtgagatgctgggcatagtgcctacttttaataagcaatcaataactgttccttactatcatgatcctaagaagactcactcattcattcattcaacaagtatgaactatgtgtcaggcactgttccaggtactagggacatagcgaaaaacaagggggccacagtccctgccacattgctatcatggaagctgcagtcctacctgtcagtacaaagcaggctgcgtatggtgctcctatagcacgaatcctaacagcacaatacaaaggtcagagaggaattcattccaatggatgagaatgggaaagctgcacacaggagctggagtcagagctgtgccttaatggggagaaggattacaacctgcagagtcagggcaggaacttactcatgaccaggcacagggcagagacagcaagaagatgcagctagcagcctagtggagctggggcaggaagtacagggaaaggggaggcaggaggcagggctgtgcatatggggatgccaaccagggtctgcctccactctctggccaaaccatactatttgtgtttgtttaaatcccaaacactgaaaattactgatgtcaggaaactgaaaccaggccacagctttcattcttgattattcttaccaaatgcagaggccagtcaacagaaggtccagagattcacagaatcatcctgaccctgcctgaaggtggggcggggctcttcagccaagcaggtggccttgggcccagatgctccattgaagcagaggaacagagagatgcttgagacttcagctgagccctgggtggggtaaccattaaaaggaagagtggtgtgctgaccccatccaccgcttcccttaggaaaatggtggcctaccaccacaactctttggtctcatttgggtttctctgtaaactccagaaagcaataaagcatgattcctaaaaaagagggctactaggtggaggttatgcagacctaatatgttcccctcagtcactgcagctgcacaggaaggggcacccaaacctcagagtaagttgcgtaagaacaacagacaacaggcaagtctgtctagtaactcacctgttcccatgaaaagaaaaaaaaatgtcactccatgcaaatgaggggtgtgggagggtgttgagcttcaataaggctctccccaacggtctcctccctaacaggctgtaaaataacatgaagcatggccccaaagggccgtgaatgacccctggagcaaaggactccaaaaggctctgcagagcttttggcacatctgaacaggggcccggatcccagcgcaccctcttctgggctctgactttggcaagttactcaacccctcagagcctcagattcctctttggaaataataatgggaataataatatgccccttttggtaggcagaacgatgaccctcaaagatgtctgtgttaatcttgggacctgtgaatatggtcatctacatgccagaaggaaatgaacgcagcaggcaaattaaggttgctgataggctgacctggagatgggaagagtatcctggagtatccaggtgggcccaatgtaatcacaagagtccttaaaagtagaagaaggaggcaaagaagagatggcaggaagcaagatcagagtgatgcaaggtggggatgcacccttagttgctggctgtgaaggtggagaaaggggccatgagccaaggggtgtaggtggcctctagaagctggaaaaggcaaggacatggaatcttccctagagcctctggagagacccatgttggacttctcacccacagaactgcttggaaatagaaaacttctacaccattttgcaaggttgtgaggctgatgcttggcactcagcaaggcctctctctttcttccttccttcctttcttccttccttctttcctttcttccttccttctttccttccttctttcttttctttccttccttttattttccttccttcctttcttccttcctttccttccttgcttcctttcttccttccttcactttcttccttctttccttccttccttctttcctctttccttccttccttctttccttttcttttccttcctctttctctgtttctctttctctctttctgactttctttcttttcttttcttttcttttttcttttctttagcagggtcttactatgttgcccaggttggtctcaaacacctgagctcaggggtcctcctgcctcatcctccccagtagcaaggccactttcttctctaggctgttattagcttctgtgggtacacaccatgctccacacatactaggcttcattctccctgtcttagcccatcattgcagcctccactgagccccagcctctcacagaagcctatcctcattctcccacccacatgagctctcactcctctgaactcccatggcctttacagcctgtaccttgcaattacgggcttaattatatagtgggtagtgttacctgctgtcactgcatgtgtgtttattttggttccaaaatgagattgaaactttagtctcaaacaggaacaatgttttgtccttttgttgttgttgtttttaagcacctgtgctttttttatataatcctgtttttattgccttctgacacaaaaaaaggactattttgggcatatatttataagcagataccctacatcattgcaactgccctgtgattgggcattaactcatttttctattttctagcagagtttactgaaggttttaaggtttaaggtctaaggccagttctgatacagacaatagaatcaagtttatagttttccaatcatggttccaatgaccatggtcccttatcatatgccgatttcatcagtcaaagaacaggggatggtgttggaaatcacagtaccagtaggatacagggtggcccggcatgtgttcctctcatcccagtgctgagcacacagtaggtaataaaaatgggctagaaaactggctggtgagtgcatcattactttcctcctactcccttctttaaatcctacaagatcaccctcaacaaaaacatacacacaggcaaggtgcagtggctcacacttgtaatcccagcactttgggaggctgaggcgggtagatcacctgaggtcaggagtttgagaccagcctggccaacatggcgatcccgtctctactaaaaatacaaacattagctgggtgtggtggcaagtgcctgtaatctgagctatcggggaggctgaggcaggagaatcgcttgaacccaggaggcagaggttgcagcgagccaatatcgcaccactgcactccagcctgggcaacaagggcgaaactccaaaacacaaaaacaaaaacaaaaaaacatacacacaaacagaggcagcacagcccattgacctaccttggggatacattcccaaaagagaatgagacagacggacatatgagttctccttggagcatgttattcaaatctcaaaataagataaagctctcatttcaaggtgcatttattttagtgaggtttggatttgtaagggaaacaaaatgaataagttggtgggtggggacaggaattaaaataagcagcgtcttgctgcttgccgacatgactgtcctcacatccgctgccttattttttattctgttctggtttgttttctcctgcggtgctttaaaatatgatgggtaggttagaaagagagaccgaggtaatcctggcttctgttcattaagctcgtatgaagtacgtgctgtgctactcacattacctcggtgaatccctatgaggtgggtgctgtaattagcccattgtacaggtgagataactgagcctgaggcagataaaatgctcatgctgagcgacccatcagcaaacagtttagccaagatgtggactgagttggtggagctcagagctgagctttaatctactctgcgccaatatccggggtgttcttaagccccagtctctctgtcccagatggagcaggtcggatctccaagctgctgaggggcactaggactcgggagacaccaggctagctctgcattcttctggtcctcctggcatttctagaaactggaggtgggcaaggaggagggggaaagaggagccaggagaacacggagtcttaaataagatctcttccctctcttcctgcctggagtgaagccctttatgagtaagcaccgatggagggatgccaacacaacacagcaaaactagccctgtcattcccaacccaggcctcacaactccaaatcattcaaggggtaaggacacagaaagaagagcagaggaagagtgtggacataaagtcagaccacatactggggaatgcacccctcccaccactcccaggagatgtgaccttggacaagataatctctcttagcctcagtttcttcatctgtaaatggggaaatgacaagtcctgcctcataggtttgctctgaggattaagtgagtccgtgtctgtgaggggctttccagagtgcccatcacacagtaggagctgactacatagtagtgtctctatgagtacaccgttacatgcactaggatgatctgcacaatgaatatattctgtactatacaacacgcaatcatatgccgacaattgaaaactaaacacggtgtggggagcgttctgggacaggtaagggcagggaccctgcattcactctggtttttatctcccacagagccagctaccgcacagtcctgtaccctcagcagggccaggaaagtttgtgcaggagaatggggatagacttcggtttcctgcatcttatcccaaacctcagccagaaaaggcagcacccttccactttccaggagaagggcagccatgcctgaaatgcccctatttaatgggattatttcttctcctttataagtcatatctcatgggaatgttcattttctctctggaagctcattggtacaatggttgtttcacaatgtaataacccatgtattaagtcagatgagaacctccttgaaatattattgtactgaattctcttccataacagggagatcagttttagatttcacccaaggagatttcgctaccaaagaacctaaagcatttcattaaaggtgctttctcctacaagaggaaagaggtttttttatttttgttattattatttcatatcccaaaaggttattgttctatgtgttcaatttcaatagtacttatgcttcctaaccataccgtatcatttacttccttattaggttcagtgtttcctgctttcccaacactgcagtataggagggtagggggataggactctatttcttcactgttgtttcccaatcatctggaatggtacctgacatatagtagatgctcaataaatattaatatacaaatggaagcacatttagagcacatttcttttggaaagcgaccacagttgatacaaagatgtatctcattagaaattcatttccacctcttttatttcctattcaatttttttcacccccattctgtgtttgtgccaatagattttttatgagatcacaacatatctccaaaaatcagaattaaatcatccacaggaaggctatggatttcaaagcataccagaactcctggccctaaaatgcttcagggaacgtgtcactcaccacaaggaagctgggctccacacttttaccgggggcatgttctgctcactgcagaggaggatgtctccaccacagtcaccagggagcccttccatcacccaggcccacaggggaccaagagacaatggacactggcagaaagtgcagattcatgaagtgtgaggactagaaggtaatttcatttaaacccccattcttcagatgagaaaactgaggatccagaaaagcaaagtggttgttcgagtgcacagggtaattaagcacagctcagtgaagaaggcagatcccacctctccccttccccatcgatttccctgtgtgtgcatgggtatgtgtttgaactcttagcaacaagatgttttaaaaggagtccctgttaacaactcatccataattttgactcaggggtgctgctgatagaattctactagcttccctgtccaccccaatgacctagatcccaaatttcccattaatgacccaagaaccttaaagactttctgagctaaaagattcttcgaagtcatctagccaaatctttatcttacagatgaaaaacaacaggctaggtaaagaaaattgagctcccaggtcacaaagccagttagcagtgaagctacagcagctgggactgctggcacccagggccacgtaagttacactgaggacacttctcagatttgtgtgtgactctactagcctcatcaggataaggagaaaataaggaggaatcaggatacgatacggagaaaataaggaggaatcaggatacgataagcaaaaaatccagtctaaccaagcatatctcaggtccaaaacaaaaacttttccttagagcaagagaatataattctaatgagaaaactgtagcaaaagaaatctttttaggatatggacacatacatatatatatatatgcatgcacacgtgtatgtgcatataatatagagattaccacacatactatattaagaagatgcttattttttaaaaaaatacttgacactaggtatataataaattcccagtgctagcaatggcatcaaaatggattgctagcggaagcctatcttgacacaacattttttaagttatccatcaatgtctgcacaaaagaaaatacacatattctttgaaccagcagttcctcttccaggaacctggaactattgatagaattagaattatacaaatatatgaataacagtgtttattaaaccattgtttctagcagcaataaaaggaaaaggaaaacattcaggtggtctatcattagggttatggctgaatatactgcgatacaaacaaattatggaattttatgcaactcttacaaaatgagttatcacagagctgacggaatgtccatcatgattagttaggaagccaaattgtggtgcaatgtaattatttgaaacaatttcttatacaaacaccaccatctctaaaacactatcatgtgtgcacatgtgaaggcctgggaaccgtgggtgtctaaaggaggaggcagtgatggaggcaaggggaaaagatgatgaatgctctcttcacacatctttgttttcattgattacaatgcatgcatattactttttaaataattaagccaaaaatcctaaaaataaggacagaaggaacccacaaatagtcctccaggttctgtttcggcctgccttcttccctagtagaccccatgacagcaggaatactctgaattcagggaaaaaatgaaatcaacgcagcaatgagaaacttgaagctgtctctctaagccctgggcttccatgactatcctctggtcaagttactttctccactaaagtgttctagtcctggtccaggaggtgccctgtacagtacagcccagcagcactctccccttaacacagaaagggacctcagtctcctgtaaggtgagagatgactcaagaagcttcatctctccctgccctacaaagaaccttgtacctataaatagaccatgcagaacccactttttggaagcagaccaaagctaactttggcaggcaggcctctggggtacctgagccagccactcggaaagttggccttacccccatgggcttcttaatccagtcctgactctaagttcctgaatgaaaagtgacagaaccatgaacataaaggccctggctgtgacagtgatgaccactaggctttgacaatgataaaactgcactgcctgaagcgcaaactgtgcaaaccctttggggctagtgctccaaagagagctgccaccatcaacttctaaaactccaagagcccgttgttcacattaatacatacaacattgtttgtagggagacagccccctcatccactgcaaattctgtccttcagccatgactcaggaaccaggaaggagaaggaaagagaggctgacttaccaagccaacttctgtttaagtacacagacacaaacacggggggcaccgtgaagaaatccactacagagttcacttccagccagaaccacaatttatcgttggctgcaataaactgggggaaagaagaaataagaaagagaaaaaacatgagaagcatggtgctggcatccaatgtacactcttttgtcaaagggtaagttttgagttttcatagggccaccacgcccggctaatttttgtatttttagtaaagatgggatttcaccatgttggccaggctggtctcgagctcctgacatcaggtgatccactcgcctcagcctcccaaagtgctgggattacaggcatgagtcactgcactcggcctatttctatttaatttttaaggtctggagggagacattatgtccttctcatatctacacaaagcacatgcttttatgattggacacacacgttttctagtgccccatagagagccctatatagactaactatatgctatgctagtcttaagagaaagatcaggcagtgtatttttctgtggttcccaacagcttcatagggaagattgggtgattttacttgtattagactcattcatgtaaatataactataaataaagcacatatgtacgcattcacacacacacacacacacacacacacaaaattccatccatctactctcctcaccttcctttcattcatactcacaactgctctctcagggctcagctaagtgaacactgctaaacgtaattttaagagctgaagaggtttatttctatttacttttgttttgttttatttttttgagatggagtcttactctgttgcccaggctggagtgcagtggcgtgatttcagctcactgcaacctctgcctcccaggttcaagcaattctcctgtctcagcctcctgagtagctgggattacagatgcccgccgccacgcctggctaacttttgtatttttagtagagatgggatttcaccaggttggtcaggctggtctcgaactcctgacctcaggtgattcacccgcctcagcctcccaaagctgggattacaggcgtgagccaccacactcagcctatttctatttaatttttaagggaacagggcattatgtgaatagagagatgagaaacaatccaccggtggatacatcatcatttttcttcaatccctatttctcccccttgaaacaaaactgatgtgaattccagaaaatgcttagctaaggagagggctctctctcagactgaaaatcagaatgcgggtgcgctgtttctcctggaaatatcttgactgcgagagcagaggctgagggggatgatccctgggtcccagactgaaacaccccattgtgatactgaacaatgttgcacaaacttacccgcaagccgaagtagagaaggaagaacacgttgaaagccatgtcgatctgtaatgtgaaatctttgtagaaattctggcaggattctattgggctattagacaggaagaagaaaaagcaagaggtaaatgacaggtagtatcatcctgtctcccacgatgctgagaagtggtagtgcttagggtagacgatgaaatgaatattcataaaagaaaacatttggtctttctgcctcctgggatcatcaagcaagcattgccaaggggtctttccattcaaccattcaggaactactgttcttttatttattgttttcgaaattattatatactatcattttttatcatcattcagcagttgaactaagaatctaaagaggatcatgcagataccctggaggaaggacaagcaggagaggcctccaaattccttaatttcatattaacccttaaagaacttctttctttctttgagaggacacatactaaagctaaaacacagttcctcatgccctccaacgcattggcagtggggcctgttttcaattaaacacagtggttgtgttttggaccttttaaaaaccattagttgattaataaattcaggacccaggagcatctcaagaaagctagagaggagaggatcctgggtgaggttctggctagattaagcacagactttctgtgcaggactcggatctggggaaagaagcattgtccgaccagtcaaattcagaccattaaaccaaaaggttgaagcagtactctaagggttaattttttttttttttggcatgcatgctaattgacttggtgtgtgtgtcgagcagccaatgcaaacccctagcacactctacttcaagagtcgccagttcaaaagggtactactatacaaactggtacaagacttctgtgtgctttcctgtgtcaaactgatcagaggatcagtgtgtggaaagtcccaaggtttgggctgggtgggaagtaggaaagcctcataaacactcaaagctgtgaatggaaattcacatagtattctgtgatcagtaggtaaatagtaacacccaggccaggaacgtgaaggtgaagtgaggtgagggaaaggagacagaataccaagagaagcaaaacactttagctaaagggaagcgacagacctcctccctccaggagagggccagcttgagaaatggaagatgaaggatttcctagtagtgccactttggaaatcactgtgtgcaataccagttagtatagttgcacttctgtaaggacaacgcttggctgttcaacaggcaggaatctgtgcagtagaggaactcggggcccacttagaggcagggtaagttagtctgtgggaatctccgatcatgttccatgcactggatttatccattcttcatctctgctacaagtcaaacatgccctatatcatctcccaaatcacgtggaaaaatctccagacaagcattaagagtaacctttatttgcattcacaaactaggtggactgaacaaaaaacaacactgaaaaacagttcaaaaaaaaacaaaaaacaaaaaaaaacgacaattgccaggttttcactaaggtagggaattgggtagaaagacagcatggaatttggttagtccaatgctgaaaggagacacaagcaaggaagccaaatatcacagcctgccatggctctaggcctgctctcctacacaggtactaatttcgatgaaaaaaggaaaatccaggctacagtgaatcggtgatacttctgcaattctcaggccatgggggtgcttgtttttgtttcaaaaacaagacccaaaggtccatgggtgtcagagttcccagccactctagttgcagtgaaaaatgtacaggaactaggttgaccagaaatcctatagactccagggttgaagagacaatgcatctctgcaggatacgttactaaagagtaaatgtgtgtgtgtgtgtgtgtgtgtgtgtgtgtgtgtgtgtgtcagagaataagcaagcaaggatggggagatctgtaggtaactactgtactcaggtgctcacttgtgccagcggggactcacatagctgtgcattataaactcacagtcatcaagattgatgtatacgcagtcaaggggagagaaaaaaagggcttggtttccaagactatcatggaaaactgactattgtttcaccaaggccaaaaccttacagttgccctcacagtcgttattggtggagttactggtggcatatttggggccatcatgagttccctagctcctattaatcccgtggcctctgtggttaatttggtggtaacctagaaatacagctaattggaaaagtatttgctaggctgtggtagaaaatggaatagttgggggagagatgtgagctgaatgccacagaggatacttggattcaacataaatggaaacaggtattgagaagagcataaggaattggctgcagtgacttctccactgtttcttaccttcctggtcctttctgtcatccctcctcataatgcttatgttcaatggccacagtgagagggcttgaagctagaggacatgggtgttgaaaaacgcaccttaacaacacccctggtttacaggaaaccatgttgaagccatacaagaccttttccttttctctaatcctttcaaaaaatttagaaccgatttcatcatgtttcattatcattccttgcgtactagacttggagctgaaatactaaaggaagtaaatgatgccgctggcgcgggtggcttttcctctggctggagctggcaggtaatatgagcatacctcaataatatgagggggcagggggcaggcagagaagcaggaaactctgggacaaaagacccatataggatgagtgatcgggcaatgtactttctatcccttttagctatttcctgcttgccactacagccccaggagaaatgtcctgcctgatttttttcaagtggcaacagaactgtttatcagatcccctctgagataagtcctctgagtgcctgtagtttacggactcgcacaatcagagaccacagagtggagcttccaaatccccattatttcattccccaaatggaaacaacccatggagaagttcaatgatcctttaaaaaaagaatacatatttcaacaacaaaagagttggccatatcaaccaggatttattttcctcccaaagagacttcatcttaatgattaatgcacattataggatggagaatgaaatacaaacacctctcccttcttgtgtaaagtaggaggagtttccttgtctagatacacagaaacttcaaaagctagcaaagaaattgtgctttaaagaaaaaaaaactacaaaggaaagtgactctggatcacacacagacttagatttccagtctgatgaggcatatccacctcagaaggatttacatgggcatatgttgccaacaggaaaaaaaaaaaagtggagttttatgaactgaaataacactagttctgcctctggtagtagaaaactgacttaccctaaattgctacgggttaactaacttaacttatatcctcttaataattagagaatataagatacttggtaagtggcagactattcatttctaggctcccataatccatgaaacaagtgtgatactaaaaccacaggcaaatttagcatgttgaccaggactccatgactgagcaccttcaaaagagcctcagtaaagagttgattcttatggagtaaatgttcagttgtagggtagaggttgaaatacaaactcctatttcctcttggccatcaagtaagtacatcctcagcatttagatgcctctacagaggaaaatgagactcacccaaagtgggaaatgtttctctttcctcatctacttagtcatagaattttcaaaaagactcttgagcaggatgatccaacagaccttcccaaagactgacttaagaacttatcttttcagagcacaaggcaagtgagggctacccaggttttttttcagagggcaggagctctcagcacaaaatctcactgctagcagttgttcctctgggcatcttcctcatctccaagagggaaggatcacccgctcctcacagcctctaaacttccctgggtttcctgcagtctgttttcccacctccctgagtctggctgccgaaccctgtgaagctacttctccagggtagtggttctcaaactttggcatgcagttggagggcttgttaaaatcttgctgggctccatccccagtttctgatttagtaggtttggggtgggggccctagattttgcatttcttacagtttcccagataatggggatgctgcttatctgggaacaccgctttgagacctgccactcccaaaaaacctttcttgcaactacacactaattataggtgttgctgctcgagaagcttcccattcagacctgaacagagatgattcagtgtttgagccagcccccagataaccagctgcctaccacttagctaattgctgggatcaaggggttgaacagacattttctgtttcagatgcgaacaagggggtgaaaaaattaaaaagatacagggaagcaattgcaatgccactgtgcaagcttcaccagtggacgttccaattaacaatcagagagtacctgctgagcacattttagattaagattaaaaggaaaaatgatgaagtacagatggggaggggttacggagaccatcatttacaagggataaagaaatggtaagtagcttaagaatgacaacaacaataacacacacccaagatgatttactagggacgggactggctgaggaacaagatatcattttgtgaaataatttccaacgttcaaattctcctcactcttgtggctagtccctttctaaattgaatggggccctctcaattcccaccaggattatggacaggcagagttcaggcccacagcaccacagacatgagtcaatgcaataagcctaatgattctagactcttttcctagtctcacctctgcaatgttgccaaattaatttaattaaaaatgtcattcatccaccatcacggtccctgcctgtttcatatagtaactctaagcctggctaggaagaatttctaaaacctaaactcattctacatctcttactttattttctactatgtttcagtccaaacccttgccttcattatttcatgaatgtgacccatgtattccctaattttaaatctatgccttctctgtggcctcttcaactgctgattactctttgtgttcaaaccttgggcagtcttcgaggccaacctccaggcttgattcagcaaactacttgtgccctcattgacctctcccatctctgaattcccatgctactgggaggaaaaaaattctaaactgcctcattatgttcatattcaattattcttcaattcaatgtaataatacctgacaattgtataaaatttacatatgctattgcatttggtcctcacaaaatggcagaataaagtagatattgtactataatccccattttacagacagagaagcagaggctcagatatccaatcaagaccctgcagctatgtggtagagttaggatagagacccactagccttgtgccataccacttcctctccagatggagtgcagccttcttggagaggaagaggaagcataagacatagtgtctgctatctacagagcctcgcctggggctcatgcaaaaatgatgggggttgactgattcataaatccttcatagaggaggacaaactgccctagaaaataactgatgtgtctgttgggtggtctaggaaaatgcagaggaagcagatgtattcaacctgtacctaaccctaaccctgctctgtagagactgtcatgtgggacactaataatccccagaagtcctctctgggaccccgtgtggggtggtggtatcaggaagactgatcccatcggctgaggggaagttcttctgcttatagagggataactcctagttatccaactgattaaagatgaatgacccttcaagtggcccaattttccctcaccctctcctattctaggagaacaaggatgaagataatgaaagctgataatacttagacactctgaagactcttaattatgaactagatgattaataagctttgcatcccatttgatccaatcaaaataaataaaaaagatgatatcatatggatatggatttttatggaatctatctataaccaagagagtaggtctaagtgatttgaagctttcctggctacctctggatatcctggataaactgcctacactggaataaaagcatctagccagccagaatattatgagacagactaattttaaaaggaggcaagtctttgcaatgtacttcaaattagaaactgatattattattcataaaatttaagatcacagaaaaatattttgtgagctaataacaataatggatttagtgtgaatgacatgatatgaattcatcattgagaaagcaataatatttatatagaacattttctcctgaacttgggacaacaccccaagactgccctgaacctgacgggatccaagctgaaagctttgtattcttttggttttcttcatgctgccattttacttatcttatcagagctgtgtacctaagagtttatctttctaatatcgattcttctcatgtttacactggacggggcatgtgtgttcaataagttgtgtagtttttagttttaccaaacagaataaagcctcttcactttatcccagacatcatggaatagttatcttctaagatgtggtcacctttgatgggtcagtttgtggtcaatcatccatcaatagtaatgatgataacatcaaaatgggccccccttttttaatcttaaaacatttttcttagaccttgaaatgactctaatgtaaatagaaaacagtttttgttactctgcagtactgatcgattatgatcccatgccagctggttgtttaactggctttactgggaagtcatcagttatgggtttgtatcaacaggactattaatccttttgatggcagcaggcttctaattatagctctgctcagttgaagagatgtgatccaatagccacaaatatatgtattccatgttgaaatgaattggagcataccggaaagtagtataaaaaccctaacaactctttagcatccatatacactctgtattcttgagctttgagtaatatggagactcctgaaacaatgatagcagttgacttcagagcagttgtaaggctcaggatgtctacctgaataattattcctaagagtaaaacattcttctaggagacaaagaaaatgacatagattgctaacagagagaatggaatatgtcaattctttataaatttctcaataaaacacacacagatcatttgctttcaagaaactcaggtggcgagaacccttttgtttgttatgaagttcttttaaattttatctaacaagacttcaatattatatctgaactaagagtctcctttcccatcttcattccatatttcttatccacgatagacctagataggtatagcaaaagcaaaatacgggcattacaagttgacctcaaaagtggttggcagctaggtagttttagaattcaatggaagagctaaagttccagccctatcacctcctagctataggatcttaagcaaataatttgacctcttcaagtctttgttttctcttctgtaaactggggataaggttacgaattcccaacgttgttctaagactgaatcagatgactcagcactcaaaagtgatagtaatttccaaaactaaggtaataataatagtgataatagtaactgtttgtagaaaatgcccccaaaaggcaatcattcaactgaacaaaaactgataggatcaattgtttctatttttttcatttgtatctgctttactgcctctttatctggtgttgcactgtaatccaaatgcccaacaggctgtgcattgggctactgtaagatttcacaaatgcctagtataattctatagagtattaaagaagaaaaagtgaaaattatatttccatgaaggcagccacacagtctcataaatgctaaataattagccaagatttcttgacagagaaagccataagtcactttaatgagtggccacaggagtttgttattctccttttttcctagtttttttttttagagatgagagctttccttgcctggttggcttagcacggatctacataagaggcagagatctgaaccagtcatatgtcttgtaaatatctcttgtaagttttcttctctaagagcacgtactttttcactgttacacttttggaatgatgtccaagacaacctacccactaatgcttgttttctccagcttatctgcagactacaattatttcaatcacagttgttaccagagtagaattagtgttcatatttgccagcaacttctatgtaataaatcagagctaagctactacataaaacagagtctttccaaacaagtattgcttgattttagttttcactaaactgtcttaggaatcatgactgaccaattctactcactcgttccactccctccactgattctagccatcccttttttttagggaacccttatttatctagaaaaggaatgggatggagtaggtgattcaaatagcactaaatgcatatgcacttatgcacatataccagaagacagagtgaaagttcttcgagggcagggtcaatgagccatgtataggtatggagtggttcatgtgggtgggcacccacacaacgtgtacacacaaacatccccagcctcccagcacaaatatatgctctccatccaaccccaaccccactctgggaccactcacaaaacaggacagcctagatgaggtgattagaaatgggggaaaggaaagagaagagaagtcccaggtctgaatggagagctgagaatctagacacaaatgctggcatggggaatggaacctctgacccctggatccatactcctctcacatctacaggaatttagtcctagggaaacaagaatagactattcatgtaaccactacattctgcttcctatgccttttttttctggatattaaaattgccacctatgtgctaggaggctgataaacaataatctataaccagggatagccaacaacccctagccattggggagcaacagcctggagctcacatttctgaaagagagggcatcctagagaaagtagctcagggtacagtttcaaggcacttcatatcaaggcttcccaaataagaagccctcatattcatacaggggatggcagaggctcctaagagaaaagaagagctctctatttgccaaaggctggccaatcagggcacggttgggcaggtaggctggtactcccatagcataacagactgtcaaatcactgtgggacttctttgggctgttactagatgcagacttcaaaattctgtctgagccttctccagatgtttgccttggactctttgggcctcccctggtcatctcaccagtcccctatttaacttatgccttatactcccttttcttgccctcctacctggctttgacatagtcctgtcatacctggatggcatgaccctggcaatggcaccttgctatgggtctacctgtaaggatttggagtacagaagctaaaactattgaatcgacagctagaaccagcctgttctgagttccggactgacagttgcggataatgagatgcctgagacgtatctctttcttattctgaaccttagtatttcagccagtagcctaagaggtctattacagttccaactcttgtacctcttggcacatctgcactcaagcagaatggcacacaagcccctcagcagggcactcaaggtctacactaacaaagagtaccaatgctgaagacttgctgatcctgaatgtaggaagcctgagaacatctggaaaaaaaaataattatgtttaaaaaacagttgttccatttatctgctgcttcactttgacgaacagaaaacaatgtcacataacatagatagtcaccacaaggacaccagcttgtttaaagttacacatgaatttatatgtgatgctgaaggataattataatggcttatatctatttctaacatcttgaagttttgttgttgttgttgttgttattgttgttgttgttgttgaggattttttttaagaacacacagagaaagacctggtagaagtctttctgacatctggcatagaagacaattatacctttattgcacaaggaaataaaatagctgtgtcttagctccgtctttggctgacagctaaggcctggaagttttgtaagttttcctatttaggagttttgttgagagcctagcagcctcacagccaaaacggagtgtctgagatgctgctgattagaagtcatgggtctgctgagtacaaggctagagtcactccttaggaatgtcataaaggacctgggcagtagaaaccaacaccaccatggaaaatcagacaggatgagttacctttaaaacaaactgtcatcattaatagggaaaatggcaatgacttattaacccctatgattatacaatcatatcttcaagtatgcacacttttcatttccttcttgacaacttcatgaaagtaatgtctcatctcctggaacatttcttttcctttttttttctttccttcttgcttctaattaacattgaaaatcatttatttatcaaaattaggtttcccctgcccatgtttcagaaataataaatagctggctgagtatggtggctcaagcctgtaatcccagcactttgggaggccgaggcaggtggatcacttaaagtcaggagttcgagaccagcctggccaacatggtgaaaccccacctccactgaaaatacaaaaattagctgggagtggtggtgaacacctgtagtcccagctactcgggaggctgaggcaggagaatggtttgaactcgggtggtagaggttgcagtgagccaagatcataccactgcactccagcctgggcaacggagtgagactgtctcaaaaaaagaaaaataataataaatagctatttccaccatatcaatgacatccactagatttttgggtataaatttggaaagaaatatgatgaattacctgctcagtggggtgaagtgtctttctccttgcttcctcctgcaggcccttcttttaattttattgtcctatctttgaacttctctagagatgttattcctatcattataaaaacatctctgtgagaggcctaggatggccccaggaagccgatttcttaggattttctcttctgtctctgtgaatggatctctgtatccccactttctgttgggcttcagaaatcctttcattttatgaggaatcactgtgtttttctgggaaagaggaatgggtctctgtactgaagaatctcacaaaagagaatcagatgtttccttcgccaagcccccagatgaaaacgttcataaagtgagaatatgccaacgtgctgggcaggatcgcctgcctgcacaggtctgtactgtaattacatttaagctcctttcaaaaagcgaaatgctcccattcaaaggatctttttactggttaccaaaagaacatgttatgaaattctaagcaaagtccatttcaatataatacatgggatatggttaatagaataggaggaaaaaggactgtgggaagagcttcaatctactaagcccccagattgtagaagatcagatttcatgaagaaaacctaaaaataagataagaagcattcggctttgtttcattctgactgcttagtgcctactcttgggctaagggatgctgacaagctagtatcatcaagaattgtctaggaactgttattcctaccctaggattatcacagcttggaatgcctcgcctttcatttttctcagcttacaaccaaggcatgtctaaaatgcaaagtatctatttgaaatgacaaaaaaagaaatgcagtgagaaaacagatcctgacagttgtgttttataaaagtccattctgagaatacaagaaagaagtatacaagtttaaaaaaaataaggaaaagaaagcagttttaaagtaagtcattagacagccctaaggcaaaaaaaaaatatttcaaggagagaaaatgatcacaatttactaatcaatgatgttgaatgcagtgccaacatgctttaacaaatgcgatatttcttcctagtagtaccatttcatttcttttaaagttgaattaatagttttactaaacactatgaaaacgatcaataattgcatttcctgaggcatttagcccaagaagtgcttttaaaaggtatatctttttatttagatatttgttagatctaagcaaaatcaaatcaggtaacattattcagaaagacatgaaagggtatcatcatcctggtcacttggtgcacacccaggtggagtcaggaacatgtaggactgatgatcaggtaggttgttacttggaaaactggtcctagcttctaattatttgtcattagtctttgctcagcataaacctaaaaacgggagatttatctctctcttttccaatgtcctagtcttgaattttcaagggacatggtggcctttgtgatatcacagcaaactgagggcccacagggatgatccaggagaagcctcaggcccagtgcttcagtgtattggaatgctcgctgctttaattcatgcatgcgtccagtgctcaccacgttcagggccatcggggaaagcacgtcaacatgcttgggcagtgcaggaaaagaatctggttaacctggaggcgacaaccgaaagggggaggttgcatcatgcaaatgaaaaccacagcttggccttagctgccatgcagaaaggacctacatcaaagagtctgcagtgcggctcctgggtaagagtcgatatgagagaggtgagttacttcagcaatgagagacacaggcagaaaaatgttcaaaccactctaaacagaacactgtacagagcgctggcattacacgcgagaagaggcagctttggggacgaggaggggcgagacagagggaaggtgaggacagaactggccgttactcaatgaaatggcttccctggccatcctttcatatgcatgtatttttataatgtatttcacttcaacaaataacctcatgagagtttttaacatcaaccataattgttaagatgttgtgaaaattcaggagaaacaaggcatcagttacataaagatacacaccatggtttcctgtagttacagttcattatagaagcagagctgaagcgggtcagataaataagagacagttaagtgccaacatccttaacactttggttacagagctcatgatgactctcaaggcgtaatgtagtgttgaaggaacccaacagtcgtgaaagctcgggtggtgcaagggtagggactctatgcatctatacccctgaaagccatttataaccctgaagttaaccacgctctcaagtgaagccatcttttcttcatctcagcatgaatgacaggtgaacagtgagctcacctcatacatattgaccatttagcagaaccctagttacgagcaagattctcaaaggtatttcttatcaaaatcaattcatcagcaaaaagcatatatatgtgatatatatatatatatatatatatatttcttaacatttctcttaaaggagtaataatactgttttaaattcagtagagattcatcaagcttcgctctaatgtcaaggctacactggatatctaaaaactagtttcctgtaaactccctgcttaatataaggcttgttatcatttttcttgcctcttctgccttttatgatctctggtacattgaacacaactcaaaaaatggtacggtctagtcctaactcacaattcctgcctcctagttctgacaggggaagagcaagccccgtgcttataaattactccttctaaaatgttctccaggagttcagccttctgattccctgcgtgtatgatggaggccttgatagggaacttaggtccagtgtgaatgagcagtgcactgcctcactttccacactcagtgagaccttaacatacccactgaaacttgagcaccacccagaacatgggagtgaatgcaggtagaagcaaaacacaggattcctcccgacactaccttcctcattccttgagatgcagctgtttccacttgatcacaatttattctctcttatagattaaaaactcagaggcttagttgaatgacatcttttcaaaggattatctttttgaacaaaaacataatagtctgtacattcattcaacaaatgtctctgagtttttttctttggtgacaggcactatgctggttttggagacatataattcaataagacatgattcttgctctggagtagttttccatttagcagagaagtctacccagattttaatttctggcagcagatatgcaagagcagcttgtttaaaaattctactgattaccttgtatgaccttggataagatatttaatcatgctgtgcctcagtgtcctcatttataaaatgcaaataatacctacctcctgaggttgttgagagaaataaatgagttagtaaacgtgaactgctttgttagtggccagcacatgatggatgctatgtcagtggtagctattatgatcagtagtactcaaatataagtaagaagcaaaggactctggaagcagaagatcgcctctgcctaacttttgcagtaggccttgagtgaggattagaaactcatcagcgtgagaaggcaggggaagggatggaagcagagggctaagcttgggcagagagacagaagcacagagaacacagtgcattctgggagtggaaggacacctcgtatagagcctaagtagattgtaaggttggcaagaaacaaggccagacaggagacggtgaagcatctgtgtgccctggaagcatgtctgctctttatcctataggaaatagggagctgacagaagtttatttattttttatttttattaaatctagtttttgagacagagtttcactctgtcacccaggctggagtgcagtggtgcgatcttggctctctgcaacctctgcctcccaggttcaagcgattctcctgcctcagcctcccaagtagctgggactacaggcgcctgccaccatggctggctaatttttgtatttttggtagagatagggtttcaccatgttggctaggctggtctcgaactcctgacctcaggtgatccacctgtcttggcctcccaaagtgctgggattacaagtgtgagccaccacgcccagcctgatagaaatttaaatgctggagagtggtaccattatcttgtcttgtagcaagttaattctggggacaatatagagtaggaattggaagcagaaggttgtgaagacagaggtcaattagtcaaattaaatccccacggaaaaaagtaacctatgcacatactaagatgagcatcattgttgccatataattacagtatcttaatatcctgggaaataccccttcttcagggcctgctgctgtcagagttctttaggaagaggggattaggtccacagtatcactgaagcaatttcctaaaccacatggttctctctcctaccacggcccccatgtctattgcaggaatctgtgtcatgaagaaatgacagcacatgtctcttaatcttctggaaaaaaaaaaacccaccctagtaagaagctgttctttctgctatttggagagcagtctctaaattatagttagaatcgacataaaatgaacatatttcagtacctcaaataggggtacctggacatagtagacacatgccaacaattatagacaaattacagataacagattatagacaaattgtatacatgtgatcacacccaggcacatagaaaaattacagtgaacacttctgctgcatccactattaattacctaaagaacttggttagtcataccgtcaagccatcaacttaactgccttttaagtgtccatccaaccctgtgcacagttaggatttcatgagcatgttggactggttttctctcacagaatcctgacctttagatttagatgtccttagtttccagagggctgcctgaaagtatgaattctggggtgtgcagggggtagggggtgaggctttcttttggcaggagttgacaagaggaaagatgccattttcaggtaatgtgctttctctttaaaaagtgaccaagtgtgtttgatactcacttagctcaattttaaccgtggtgggagctctgtaccctatgttggtaaatcagaaacaggaaagttctgtctgtgtgctgctgtgaccatgcggtcatatttgtttggtggatttccatttgttccaagtccattctagtttggagtttccatgaagccaggccaagtgtacaaatgctaacacagggaaaaagaaccctctatacatggacttacggagaagacaatacacactgaacttggaaaaggagcacaggctgagattccctaaagtggcagccaccttgctgcacagcagacactcagggagatgctccaggcagcaattgctcagcaggaaggcatgctggggaaggacctcatttcaaaggagagtagaacaggcctaagtgctgggattacaggcgtgaggcaccgcacccagcctgaaattagtattattttaaagttcacgcatgtgaccttataaaaatgttggtgcttatttttaagttatttctttttctttttaaaatttggtttctcacaagagaatttcattgtgctgatggaagagttctgtatactgactggagaggtaataaaacaaatttatgtgggataaaatgtcttggatctacacagcaaaaaaaaaaaagtgcttgtaaaaactggcaaaacatctgtacttgagtttacagcagtacgccaatatcaatttcctggttttgataacataccatgcatgcctatgtagcatatagcactatcatggggaaagcttggaaaggatacagaaactctgtcctgtttttgcaacttcttgtgaatcttaaactatttcaaaatgaagttctaattttaaaaaacagttattctcctgtttggttttactgtagccagacatcaggctagtggtctatttctggtgatatgtgcctctaaatgtctacagactgatttctttaacaaacatttactcagcacctgttataggtataatactgtgttcaattccaaaagatataaaagagggataagaaaccacagtgatacaaatcaacattaactatcttagttcctttctcaaaggagtgctaattgaggcaaagacatcatttacctactgcacaaattctcagagacaatcccccaagataatcagctgtcaataaatgtaggtcgttaatgtaataagcaagcttctagaattaacccacagtaatctcttcaggtaagcagatatcaggtaacaagctgtgctgaataatgcaactgatgtgataatgactctcttccttcacgtacagttggtgcaggctaagccatccttttccttagtttttcagtccctgttttgtccttcccagaactcagtgctcaccacactgaggagccaacaagtgatacctgcttaatgaaggtgcagggtgacactaagagctacttagattttaagaaacaactgaaaaggcttcaagaatgaatgtctaattggtggaatttcaggtactttgcaagttagaagagatgttttggagtataggagtatttacagcaccctcaaactcacccaaggatggccatctaccacactctctactaaaataagttgtcatgggcaattatattggaagtaaagtcaaggccaaatgaggcaataaggatggatccttagaatgccaaagactttgcaaggaacatgtcaacagtttttatcattctgagaagctgcctctaacaggaacaaaaagaaaacagagaaatgtgcaaagaataaaatctcctggaattgaagcctcagcaaatgaatatccaggaagagccaattcaatccttcctgaaatagaagatgtgtcactgctgttaacctgacaccgttattacctgcaagtggcttgggcttttaagaagtctggaagtaccatctttttcttgctgtttaaaggataaacaactagaacagctcaatccgggaacaaatgaatttttcaaagcattccccaaagaactgggaaactcctgctatgaagaagggtcctatcctaatcacaacaatttttaaagaagttttgtaacagtggaagacagaagactcccagaaatatttgacatctgtaagaatgaacagcagctaagaatggacgggctgctgcattcactcctctgtttcacacccatgctattcccttgcaagctcttactcatccacctttgaacactcaactcagtggctgcctcctccagaaagcctcccctgatcctcctcccacccagaggtaactgaacctttttctaggcttttcttcctgggtgcttctgttgtggcgctcatcactcatgaagtggtaatttatttgtttgtgtatctgtctcccttccctgctagactgtgagctcctgaggggagagccttggtgttttgtgtctgggttcccatcatcatggtacccgcaaaataggccctcaatacatgtttaaggaggaggagaaaaataaatgaattgagggagaaaatagacaaacctggaggaaactgattataattcaacagtaccaagatactagggaagtcccatctcccaacatggtttcaaatggccccatagtcccataccaattcagaacttaaattaggctaggcgtgatggctcacacctgtaatcccagcactttgggaggctgaggcgggcagatcacttgaagtcaggaatccgagaccagtctggccaacatagtgaaacctcatctctaatagaatacaaaaattagctgggcatggtggcgggttcctataatcccagctacttgggagactgagtcaggagaatcacttgaatccatgaggtggaagttgcagcaagccaagatcacatcactgcattccagcctgggggacacagtgagactccctctcaggaaaaaaaaaaaaaagaaagaaagaaaaaagaacttaaattatatgacaattacatcagttacaatattactacaatccctagaggatgaggtgcattcaaaggactgatttgtgtgctcttcccgtgtttcaggggagtttcaggttatctcacctcatgtgtgcaagaagaagaatgggaatgaccttggaggtaacaagattcaccactcagcaaagccatttgacctcactagccatgagaggtccaagacctgagaaggctatgggatagttaaaattccacaggagagtctccccgagggcattcaatttctgtgtcattaggcatcacaaaatctaaatgcctaaaactaaaaaaaagtcattcctctgaaactaatgagtatgcacttttctccttctatgagggttatcttctataactgggaaaccaagattgaaatgaagttgcccctgtaaacattataaaattaatcagggaagaagaaaggggaaaaaataaattaataaaccaagcttgaagcacattcagcattaagcatgaggtcaactcattctctgacctgcttcctcgacatggtttggtgcctattgtcctagaatcatgtagactctgtgataagatgatagttccccttaagtgctctatagataacaacttgaacattaagaaatgttaagctttccccgtgaggtagtctttcaggtcctgcatacgagtgaaactactacatcagctgatctgaatgaaagaccccacgggtgaccccaggaaggtctgaggaacaccacaagaagctgactcaccaaagaacacaatttccacattctgatgatttaatcccccttcccctgatcagtcaacaaccccaattttccagcccatcacgctccatgatgttcttaaaaaccacagcccagagctcctcagaaagatgaatttgaggctctcctcccatctcctcccttggtgccctgagatagttaaacccttctctgctgcaaacctgctgtctcagggtaatgggtctgttactatgcagtgggcacacaaacttattggttctatatcagaaataatacacagaggtgattgaagccccagttcgttcttctctctttgcttcaaatgatatatttttttgtgctctagctcaggaagctggacctaaacttgacacgaagcatactaggagcaaagctaaaaatctagagatgtgtgcatatcaaataggaggaagtcagctcatgtttctcttgctgattcatttctccaggaagccaacccaaggaatcaggtgttcaagcaacaatggaaaaagatgaattaaaatctccacataagaatacatagatgaagaggagtgtgggtgaggattttaacccaaagggtctccttggagagtaacttatcttactggatataaatcaacatgctctaatttttccagtaaggctgaatatatttaaaccttcaaaaaatatagtaatttttaatgcagtcttagattgatgaaggtttcttatagtttttactccatgctgcatatatgatgaagattccattaggaagtccatctgaaccaagtatttaaatcacttaacattaactttcctttgaatttgtcctctcatatcagcctagattttgataacctgctccttctagtcatcactctccctaaatataaaaccattttttaaaaaatcaggacgactttttaaaagtctatgaaattgtaaaaatttgtagagttatcactagcttctgaagtgacacctctgggtaggcaattctacaaagactatttgtaactatatgagctaatagtatagaagcagtgatgtaaaactgtattatttgtttattatgagcaacagaataatggaatgaattaatgcaccaatctcgctctaatgaatctatggacaacatgacagtatggtgtgaacagaacaaaataaaaccattgagtgggtccatttgcaaataagcccatttccccataaggcgagagaacatttgtttaatttaaagcttaagaacaatctctttacatacaaaatactttttctcagttaaaaaattataagtgctaagacaattaaattaatacagcatcaccatttttaaaactgaaaaaaagaggtttaattaatctcattgtgttctaactcactgttaaatcaataaaagagtttgaaaaaaatgtgtcaacctgacgttggattcattgtttttctatttagtagatatgtttaagaattcattgagtggtgttgtggagtttaaatgagttaaaacaggacaagggcttagacagtcactggcactgattaagggctcattaactgttacctgttgtcaaatgtaaagtcatgcgccaaacttctatctgctcttggtttttcgtctaactgggaactggacctcttgcctctacgtaagtctcctaccacccgtattactctctctctttcccactgagctctaaccatactcatcttctttctgtttcttcaactgtccaagtttttggccatctccactggaatgcaaggcccataaaagcagaaaacatgtgtgttttgttcactgtttcaccaaaacctacacaagtgcctgacacagactaagtactcaataaactttgctaaacaagtaaataaataaatggagagccaaaggaaggaataaagggaggcagggagggaggggggggcgggtcttagttcattctcactaagattaagtctatggtcaatactagtttgctagtgtttcctttatcaaaccatgcttgttattaggatcaggctgctcccacctcacttcctatgtctatatgatttttttgtactcacaaaaaggattttcctctcttgcattccaacacaaggagttccttgacaatttaatattatataatatatgcacctggaaagatgtttgacatctaatttttgacttacacttaaccacatatttccgctttcatttgaaggcaaaatggaacattttcttgtcaatttttttttctagattatgtgaagaagaaattaatagtcttgtcccatgttaatctaaagctcttctgattacataaatttaatagaggactctccctaaacaaactttaattccacacttaaagtatctttacaatgacaaaattgttctgcattctatagatattggaatataacacattgcataatttagaggttaagaaaatggactctggattcagaccaggggttcaaactctagttcctattactaaccatgtggacattgaaaccttctgaggtgttctttcttcatcaagcaaataaagaaaatcgtagtagtgctactaagtagaataataagtttgtaaaaggcttatcatggcactttgcacctagtaagtactcaataaatacagaagctgcttgtagacctagagagagcaaactagaactaagatcagaatcccctaatgatagccaggcaagccagtacctgacctattgaacatctggtagagatccactgagtgaacggctgctactggtgactaactgcatgacagcctttccttgtcttcctcgctaatgtctgttcaggttgtgtggcccttcctatactgatgtgatgtattttgtagaatccctctccttgagcctgtgatggccaaaattgcgtgcataccataaatgcttaactaggtaaaatgcctttgtaagactctgatgttagtccctgctgacaactttctacctcactacaatccactttaatctttgcattgacatttctgtttagaagagcaagccaggaatgatggctctgggctgagaatctggaatgcagattataactgctcagcaagttcgcttgctttgtgtaaactggccgcacttcttttgtcctcatttggaaaatagctttggctgcttgatatcgccacatcttccattttacacattctcagtttctgacaagaaaagtagagagtggaatgccacactgttgcaaatctgcggatacgcatcagcttaaccttatttgttctggtggatttttgtagatgagaatgaatatttgggctacaaacttccagcttgattcccttctcttagttccaatttcccagggtttgtttgctcaaatgcccaatgtaagagcactactctattctaggggccaccttccactgctgtgggttgacctcaacaggcattaaacctgtatgcagagccaggcatggtggcacatgcttataatcccggctccttggaggctgaggcgggacgatcacttgagcccagaagtttgagactgcagtaagttatgatcacacaactccagcctgggcaacatagcaagaccttgtctctaaaaataaataataagtaaataaaacgttttaaaaacctgtgcgcagaaatgaaagcccatgaacagcaaaaaaatcaaatgcaatcctggagctatgcataaaccaaaggagagatgaatatgtctagattaaagttctttagcatctactgtccatcttatgggattccatagacaaacatacagtagaaaagctcaaaataaaatggctttattctatatttaaaactacattttttccttatttgtgttattgcagactattagtttttcatgcacaggcaagagctaaacaaatacactgattccccaatgtgaccctctatagcatcaagacctatttttatagcagtgtaagtacatgcaccaactattatgtgttcttatgaagtaatcctcatcctgtcaactgctgtaagatcctggggaacatgctgagcaatgctggtgttctatggttatgcagtacttggccaagctcagtgggtaatttctcctaagtatatatatgcttaaatggcacctaccaattatctctctttggaagagtgcaagtgtagcatgcccactctcccagatgtgtgcacattcccgcctccacagagctgtctcttcgcctctcctctctagaagctctgggttagtcctttctccaggcacagaggcagctgagtgaactcagcctaggggagctatcactgttcttttcttacctctaggagttacaacagagaaaacctgttctccagaaaaagaccaccctctacaatgtcttcataggaaaaaaaatggtcacacctgtgacacagccctaattgaattcttataggcacctcagatcaaagctacccaataacctgaggtaatggaaaagaaaaacaatagagtatgacatttattcatgtaccaaattcttggtttctcacctattaatttttggtcttgcaaattttgctggaacagaacatgatagagtactggctctgaagttctaggttcagataacaaactcaaaaggggtttaggaaactaatccaagggagaatcataaatttgaaccttaacatggactctgttctccacattaaaatatattgtactaccttttttcatataacatatcaaagaaaccaagagttggctcttcgaaagaatatacaagaatgctagacagctggccagattaacaaaaaaagaagattcaaataagtgcaatcagaaatgacacagatgacattacaactgatcccacagaattacaaaagattctcgaagactattatgaatacctctatgcacataaattaggaaatctagaggagatagataaattcctggaaacacacaacctcccaagattgaaccaggaagaaagtgaaaacctgaacagaccaataacaagctctgaaatggaatcagtaatttaaaaaaaacctaccaaccaaaaaaaaaaaaaaaagtcctggaccagatgggttcacaaccaaattctaccagatgtgcaaggaactggtaccaatcctactgcaactatgccaaaacactgaggaggaagggctcctccctgatgcattctatgaagccagcatcatctttataccagaagatggcagagacacaacaaaaaaagaaaaacattaggccaatatccctgatgaacatagatgcaaaaatcctcaataaaatactggcaaatcaaatccagtggcacatcaaaaagttaattcaccacaaaccaagtaggctttatccctgggatgcaaggttggttcagtatatgcaaatcaataaatgcgattagcattataaacagaattaaaagcaaaaacacatgatcatctcaatagcctcagaaaaagattttgattaaatctaacatcccttcatgatagaaactctgaaaagagtaagcatcaaaggaacatacctcaaaataataaaaaccatctatgacaaacccacaaccaacattatactgaatgggcaaagctacaagcattccccttgagaagaggaacaaagcaaagactcccgctctcattactcctattcaatatggcattgcaagtcctagcctgagcaaccaggcaagagaaagaaagaaaaggcaaccaaataggaaaagaagaagtcaaactacctctcttcactgataatattactctttacttagaaaaccctaaagattcttataaaaggctgttataactgatcaatgattttagcaaggtttcagaatacaaaatcaatgtacaaaaatcagtagcatttctacacaccaacaacatccatgctgagagtcaaatcaagaacacagtcccattgacaatagccacacagaaaataaaatacctaggagcacagctaaaaaaggaagtgaaagatctctatgtggagaactacaaaacactgctgaaagaagtcagagacaacacaaataaatggaaaaacatttcatgctcatggataggaagactgaatattgttaaaatggccatactacctaaagcaatttacagattcaacactattcctatcaaactaccaataacattcttcacagaattagaaaaaactattctaaagttcatatgactccataaaagagcctgagtggccaaagcaattctaaacaacaaaaacaaaaacaaaaaaacaaagctggaggcatcaaactaccaacaaagctggaggcatcaaactacctgacttcaaatatactataaggctacagtaaccaaaacagcatggtattggtaaaaaaaacagacatatagatcagtgggactgaacagagaacacagaaataaagccgcacatctagagccatctgattttcaacaaggctgacaaaaacaagcagtggggaagggactctctattaaataaatggtgtgggtataactggctaaccatacgtagaagaatgaaactggactcttacctttcaccatgtacaaaaattaactcaaaatggattaaagatttaaatagaagacctcaaactataaaatctttgaagaaaacctaggaaatacccatctcaacatcagccttggcaaagaattttttactaagttcctaaaagcaactataacaaaaacaaaaattgacaagtgggacctaattaaactaaagagcttttgcacagcaaaagaaactatcaacaaagtaaaaagacaacctatagaatgggagaaaatattcgcaaactatgcatctgacaaaggtctaataactaggatctataaggaacttaaaaaaattgacaagcaaataatcccactaaaaaatggacaaaagacatgaaatgacacttctcaaaagaagacatacaagtggctaacaaacatgaaaaactgctcatcatcactaatcgtcagagaaattcaaatttaaaccacaatgagataccgtctcacaccagttagaatggctattactaaaaaatcaaaaaacaacagatgctggcaaggctgcggagaaaagggaatgtttacacactgttggtgggaatgtaaatttgttcagccaatgtggaaagcagtttggaaatttctcaaaacacttaaatcagagctaccattcaacccaacaatcccactactgggtatatacccaaaggaaactagataattataccaaaaaaacacatgcacctacatgctcattgccatgaaatttcacagtagcaaatacattgaatcaacctaggtgcccatcaatggtggactaaataaagaaaatgtggtacatacacatcatggaatattaaaaagccataaaaaagggtgaaatcaagtcttttgtggtaacgggaatggagctggaggccataatcctaagcaaattaacacaaaaacagaaaaccaaacactgcgtgttctcacttataagtgggagctgagcactgagcacacatggacataaacatgggaacaatatatactatggactactagagaggggagggaaaggaccgtgggttgaaaaactacctattgggtactatgctcgctacctgggtgcaatatattcacataacaaacctgcatatgtaccccctgtatctaaaataaaaactgaaattaaaaatatatatttttaaaagtactgtatgtatactacttttaattatgaaatgccaatttgttatattctctctctctccttctctccctcccctgctcagtgtctcttgctcttttctctctcttgctgtcttctcttccctcttcctcattaagctgtatggttaaggaaatgagagcaatctctgcttcaaggcacagccaagaggaatcagcgctcttgactttgacatcttcaattcctactaccacacttcgtcagagaaaaaaaatgacaggaaacttctagacaagatgattccctgccattatccttaaagatctatccaaatcacatcattcctttcacttgctaattggtttcgtaagccttcttcccttccttatgttttctattcttatttttgggacaattgccgacgtatgcatagttctggattttttttttaagtaatttgtagttgactatcgtttatttctgcaattggtgtaattaaatctaattacataatcggtgaaagactgagtaattacataattagaatgtgcaataataacagttgaaatcctattgttatgacgtgtaatgatacaattatgatgtataacattcacagggtactctgcaacgagcaaaaacggctctaaccctggctgaatggagcacagctaaagttggagacctggaaagtagctttcagcacctatacttggacttgcttatcatccttatccccctaatgtatcctttgacttttatactccacaggaatcaaaggcagtaggcgaggtctaaggaaggtcctcatgagggcaggagcactcacatctccaagaaccaaatcaccaatacaatcagcccttagacagaaaggagcagcaagagatggactcacatttctgaaacagtcactcctgcatgtcagttttaagtttgaaactgtaatcaggagacaaaaagttagggttggagaatgtctggtgatcacacacacaattacaagtgggcctagtgattatggcctgggacatagctcccagctctcagtctgccctctccaccccaactccagtcatcttaatcaccaggacatagaccaaccaccagaagtgctggcctcccaggtccttgctctgctgattgtcggtgaccctttcctttcctccacgccacccacccactcccatgatcttgctctggacccgaagaaagcagcaactatagtgtttctgatatctcggcctcaaacaccccattcatcaacagcaacctctcatccttgtgctcgcctgttcacgtgctccccactgggacccttccccaacctcagagaaatctccaaattctggacacctcccccgacatcccacccctggccagtcatctgctccctgccttgccttgcaacgctccttgtccagcctaattcccatagtccaccattgtcatcacccctgggcagcaccctccttccataacagaagccctcagccctacttcacaccagctctggaaagctgaaagttcctgaataaaaccacacaagggaaatgactggtttcgctttaaattcatgatctcaaactgcaaattgacactccatactgactggcaaactgctatttttcttgaattggtttgctttccaattttccaaggccactatttcacagttttccttctctcctccaacctcccatgttcttttctgcaccatcaggctcagtggatggcctcgcctcatcatgtcattaaaagtcacataaaagaatcaggccagttacactttttttcctaccagcagctctccaacactgcacttacaggcgcccagcacatcctctgcctcttcattcataacacaccatgccctccacagacactctttcagccctgtactgtctaactgtactgtgttgctatagcaagctctcccttgctgctggagctctgctgccaaaatataagcttgctcaactgtcctccatagccaaccacatttccagagactactgcaggctccatcctttagcccactttgatcaggccctccctccactcactagagcttcaatgtcaaagaaaccagcaacatccctgtcacaaactccacagatgaccctagacccttaccttccctctgtctcaacagtgcttggcaattggccactccctctgcctgaaaccctctcctccctaggcttctgccatctccttgccctgtgtgtgcccttcctcagtttcccatccagcctcctcctgctttactcaccctctaaatgttgggcatcctcttgccttcacctggggcaccttctctcctctccctacactctttccccagatggtaccatcaactcacaggcattcaaagtcatctttgtaatttccaaatgtaatatgattcctctcttctgagttctggactcaattatctaccctgctgtttgacatcttctctttcaggtgtcacagacttcttaaactgaacatatccaagatggaaatcctgatttctccctagtgcagcccttagcccccagtgcagcccctcccttcccagtaaatgctaccaccagcgacttgtcattgaagccaaacactagaaggctagaaggaccctgattcctccttccattcactccacatccaattcatcatggagtcctgtccaaaatgtctttctcctctttaatttccctacttcaccaccccactagatcaggccagtgccctcttctgtcgggatggtcttttctttatcttctgaacatgattacagattgcacctgttttgttttgttttgttttgtctgtcttttatttttgcttttttttttttttgcctgtctcctcctctagactgtgttccctgattacatttattgttttacttatttacagtttccagcatagatcaggtaattaactttcattagataaataaataaatgactatggtattggcatctataatatgcagactatgagcctcatggtaaacttataagggccaagatgaaagccagggccagagcagagataataaacttagctgaaagctactcaaaaagttaaacatcgagataccatatcttgatgtgctatgaactggattgcattcccccaaaattcatatgttgaagccccagtccccagtgttatggcatttggaggtggagcctttgggagataattaggtctaatgaggtcatcataagagtggggccttatgatgggattaatgtccttgtaagaacagataccagtgagcagtgagcttgcccctcccccccacctgtctctctctctctcctctctcctctctcctctctctctctctctctctctctgccgtgtgaggacacagcaagaaggtggccatctgcaaccctggaagagagccctcaccagaaattgaccatgctgttgccttgatcttagacttcttagcctctatttctatcttgaaaacatcatgctaattgaaagaaggaagtcacaaaaagccacatattacaaaattcaatttatatgaaatgtctagaacaggcaactctatagagacagaaagtagatgagtagttgcctagggctgagaagactgggggactgggagaatgtggaatgattgccaattgatatagggtttctttcgggggtgttgaaaattttctggaattagattgcagcgatagttgcacaaatctgtgactatactagaaaccactttaaatgagtgaattctatggtatataaaacatatttcaataaaactatgaagaagaaggggggaagaggagaagtgggaaggaagggtgagagaagcgggaggaagagaaggcaaacagcagcagctcaaattagttaacctagctgagttagtctatggaatctaagttgccaccaacaaaaaagtaagccactgctttatatgccaccaagaaagaaaatatttaccaattatagccataagaagtcatgaatgatgagacacttcctgattttggagattttaaactatgaaaaaattgtatcttagaattagtaaaatacagtacacgtagctgttgtcagatctaggtaccagcttctgaaggcttctaaatttgaattacttctttaaagataatttattaaccatgaactcattcattcataagaaaaaattttatcaaatgagtattataagctggatattggctttatatatggttttgactctgtgcacatcattcatttaatcttcaacaactacccttcaagataaacattatattcctcattttatagataagggtgtgggctacagaaaggtcccatagttcttaagtggcacagccaggatcctaagccatgtctccaggtctctgctctgtccctgtgttatgaatgaacagttcagatgcagaaaccttgtgagcaaaaactgaatttttggccaggtgcaatcttaatcgctcacgcttttaatcccagcactttgggaggctgaggcgggcggatcacctgaggtcaggagattgagaccagcttggccaacatgatgaaatcccatctctactaaaaatacaaaaattagctaggcatggtggcaggtgcctgtggtcccacctactcgggaggctgaggcaggagaatcgcttgaacctagaaggtggagattgcagtgagctgagatcatgccactgcactccaacctgggtgactctgtctcaaaaaaaaaaaaagaaactaaacaaacaaacaaaaaaaaactaaatttttttctaagccaaatgtttcctctgtcagctttagagatgtagatgcccatcaatcccatcatctcaggccttacttctcacatggccaacttctcccaacatcaactggtatgtattaaaggaataggaattacagtacatttctggagaatattcttggccaccctggaatttcctgcattcaatatgttggtttgccatgaagtctccaggagctgccgaatgaaaacatggagatacttacagatgacacagacagaacaaagtggaaaatgagaaacaaaaggagaaaaaaagtggtatgaagtgcagttgcacctcaatttatgctgcagatgctttcttgaaaattatgtgtagatcaaattgatttatgaactaaaccctatcataaattcaacaaaagcattgtgatggaaacttttgtaatcagaaaaatttatttgtgctgagaatagttgattctcagcctctcttttgaatttacttgttattcttctcaaggggagcctacctgcacataaaagttcgataaccaccagggattcttgatgtgcaggaatgtcatgagaccaaaatgctttacaaaggcttaaaaatataaactatctatgccatttataatagccatttccataatactttaaatatatatctcaacataatgggagggttgagaagatccttctcagggatggaattctaggaccactattgaaggagattatttgcgtgggtggggaagttcagaggagataagtatctcccctgggtaaccaaaagccctgaacccttctctcttgacagttgagagggagggagaagttgaaggagtccagcactccatttccaaatgactcccatggcctccttgcaaattacaacgtcactagctccctggtcttccatagccaaaggttacaaaatggccacccatacaggccatttaaaccatttaaaccatttaaaccatttaaaaccatacaggttttaaaaatcaagtgttacatttcttaaaatggatttgcagaattacttgaatgaataaaagatctgcaagacatgctccatattcccactggggaataactcactggagctgggtagatgctcctgaagacgtgtctcctggtccccactacttcttaagccttgcatccagcctggctcctgcaggcattttcacttgcaccccagtagaagtctcctctgagctaagggtcaccaccacacgactcacccaatcccatgtagagcccgcaaatatccatgatcccaagagcatcctttctttaatgtggtctcatttcaaaatatatgagactgttggatttatttatttactgatttatttatttattgagacagagtctcactccatcgaccaggctggagtgcagtggtgcaatctcggctcactgcaacctccgcttcctgggttcaagtgattctcctgcctcagcctcacaagtagctgggatcacaggtgcacgccaccatatccggctaatttttgttttttgggtagagatgggatttcatcatgttggccaggctgatctcaaactgttggcctcaagtgatctgcccgcctcggcctcccaaagtgctgggattacaggcataagctactgcgcctggccttattttttttattatttaataaattttttagagctagcccaaattctttcagatcctctgttcttgaagtgccctcctggttcatttcgtctagtgacaaatatgactccatatcaccactttcccagagaatcagcacagcagccatgcctccagagcttttgcttcacagacatgcttaataaattcactttaccctttagaccacagggcttagaaaggaatgttgtttttgttgttgttgttattgttctgctttccatcagcttaatacaatcgtgacgacatgcttctaagaaggatcctaagacgttcatttctttgaagcactattaccagtggagctgacaacaaaaagttaatagacataggactcaggcactcaggctcactctgcttaaactagcggagtggggaagaagagagacgtgtacattccatatccataccagcctggggtcttgggttctaagaggggtggtggcttttccctgagccctaaacccagcagctgcagttagtgccaaagattatgagggtacagaaagtaaagaaagatcagtgttttaaagtctccacccaccatatgatttctcagaaacctcaaatgtcctttgttgttgttgttcgttttgttttgttttgtttttgagatggagttttgctctgtcgcccaggctggagtgcagtggcgcgatcttggctcactgcaagctctgcctcccgggttcaagcaattctcttgcctcagcctcccaagtagctgggactacaggcacccaccaccacacctggctaatttagcaacctcaagtcttaatccatataggaactgtaagaagactactggtttgtttctcatcactaacatggtaactcatgattgccgaacactggctgagcagtcatgctctgcccagtggcattgttttctaagaacttaagtgtatcttctcattatcctcataaaatccccattatcagctccattccacaagtggagaccttgaaacttagagagcttaaataataataataactaaaattcatgaagggtgcccttctagcccactacacataccaggcactgttctgagtgtttttatctgttgactcaattaatcctcataacaccctttttgtgttactatttatgttgtcttcatattacaaatgaagaaactgaggcacagggaagaggtgaaataagatcacttagctggtgagtaattaggcagaacttgaacttgggcagcttgacaccaaagctgtgcttttactgctaggctgatttgctcaaagtcacaccactggttaaggctggagtttgagtctactccatgtggtcagaatctagagccacaggggcagccatgtgctctgcggcctgcttagatgttcatggggtcagatttcctctgcagtggctccaacggctggcagcagggtctgggatggatgtactgcctttctcagagctaggctgggaaaaacatttccttgtcatttattttttaaatgtcaggagattttaaaacttctaggagagcagataagtgataagaagaaaatctgggtcgtttttgtgcatacaaaggggccattctaatagtggtttcaaggggtcttttctagacaaaaggggaggagattgttttagtagccctctcttcctttcctggggagtttgaaactatctagttttgaaatctaaaaatccccaagctcttggatctggtcctttttacccccttagccatatattccagtttctgctaaaaaaagtctgcctcaagatataagtgacatccaactgttggggctgttttctcttttcatagaaaccagagcttctggggttctgagatgtctctagcggtcactgacctaaccattagcaactgggttctacaaataatgtccctggggaactcaataaaattatcaatcgctagcccccacaggtcttaatagagagtggataggtggaaggtttataaatcaggatgagtcatttgattcaccaagggaaaagataaataaaccaacactccaattaattttaacctgaaaagaaactgctagtgaatggtgcgttagccaagtccgtagggtcttaacaaccttaattattcacaaatgcaaattgcttttactgcttgctaatttcttcatgtcttccatccagttcctcttcccctcaccatcctcctctctcctcacccagtctctttattcctgaagagccaaaaggaaatttctggaaatgaccttctaatcactcaagctttttctctaaaaaaatttaacgaatcttcccaagaccctaattagcttaacctgggatccaaggactgccctaggcctaaataatccatagatgcgcttcagggaccccatgagctagctgaaattatatgcaaaattgtgggggtgggtgcaaaaaaaatcagaaagaatgaataagacctactatttgatagcacaagagggtgactatagtcaatagtaacttaattgtaccttttaaaattaactgcaagagtgtaattggattgtttgcaacacaaacgataagtgctctaggggatggataccccattctccatgatgtgattattacataataagtgcctgtatcaaaacaggtcatgtatgccacagatatatacacttgctatatacccgcaaaaattaaaaattaaaaacaaacaaaaaattgtgagggtagggtacttcctggctccctgcccacccaagaggtccaattttcatcaaattctcaagaaagtctatgttctccccaaccccctaaaacagcattaagcattaaaggactagactgtacccacctaaacactgcatcacaaggaatatttatgatgcagagtgagacagcccaggcttaggagccagacagatgcaggttcaaatcccagctctgtcacttacgagctgcatgaatttagacaaatgtcaaattctctgagcctatttcatcatctgtaaaatggtgatcataactccttcagtacaggattattgggtgactatacaaaataatacgagaaagcacaaagcatttgtacatagaaagggcaaaatgaaaatcctccctacaagagagagaaaaaaaggcagatctaggctcaggagtagagacgctgctctcccatctttgggaactgcatttctggctttgctaaagatgaaggtcactgtactacaaagacaatcagattgggatcacccctgggaaatccataagaatcagattggaagagcactctttatgagcatcatattagattataaacctttttatagatcttatagtgacatgcccaatctgatttaaaataagcctctaaccctctattctcctactgtctctacctactactcccaacataatgtgataagcaaagcctaaacatttcaatcatgtacaatgtgaagttgcaccacagtaagggcactgaaatgacctcaggaagcccgcatagccagatgtctgcagtccttctgcaagatcccaatattttcaggttctacctgggtcagttcgctgctctggggtaaatatcaattagaggcttctagatcctttggctgttgggacttccagaacagcatcaatgacttcaaaaacatcctgaagtcgattaatctgctcctgttgtatgggctagattcctgattccagagaacaggccaacagaacgcaggccaagaggaccccacctttgcatttctatttctcatggcaaggttgcctcactcccagaaaaaagaactttagctttattatctgagacaggcagaggattgaagctgattgccattctctacatatctgattttatattatgattgtattgtggggcatgctactgcagagtttaactgcattgaaatcattatatcatttctctttggctataaagaattttaatttggggctgggcgtggtagctcacacatgtaatctcagcactttgggaggctgaggcaggcagatcacaaggtcaggagttcgagaccagcctggccaacatggtgaaaccccgtctctactaaaaatacaaaaacttaaccgggcatggtggcaggcacctgtagtcccagctactcgggaggctgaggcaggagaattgcttgaacccgggaggcaggggttgcagtgcgctgagatcatgccattgcactccagctctgggtgacagagcaagtttccatctcagaaaaaaaaaaaaagaattttaatttggaagccattcatagtggttgtagtttttgctcagaccatgttgtgacacacagtgtattggcttttcagatgacattaacccagccacctgctcatcttggtcctgctcagttaacctgcacatctgtatttttgtctttaaagtctttattatcaacctcactccccagctataaaagctgtttgtcccccaaacaagttgaaaagaaagtgcagaataatcagagtgtatctagaatgaataaaaaatgagaatcccatgacatccaagatgggatacagtcttgattggacatacagacagacatggtgacagaaaactcagaagccgggagggtcagagcgatggagcttactagaacacaagttcattttctcaaatgtgagtgttttgccctctctgattggcatgccttttttccttcctcaattgtggggcactgtcctctaaccacagatgacttctttacaccgcacggttgcagatagcacagtttcaaggagggtgtgcttggatctggtagaggtcatggacgaagtgaagacaaaagtgaagtcttggtggtactggttcacgcaaggaatcaaacagcccaatgagtcagagatctgctaagtatatggaagccttcatgacttaaaatatccaactgccacgagagaagttccagaacagaggagcctcttccagcatggacccagcagctacaggagggctcagattgcttgctctgccacgcctctgccatctgccccctgctgaagtcaggccagggaagaggtgctgcccatgagtcagccattctcaactgctgcttctgccttctcactttgccatatttgctccctatctgggatggtacagttccacagaccctgatacacctggggttcagcagacctaattagccttacatgtgtctgctcccaaaatagagagtcatttattccagtttctgtcctgatcagcaaggtgtgacctaggcccatggcccatagccccagactgggagaggagccacattccttctgaacagtttctaaaaaactttcagtcccaaatgagtgactttagaagtggagttttgaggatggagctgagcacgtggatttcacatcttctcctcttttcagtatagctctcaagccccctggatgcaaaggcaggaccctgatgaacttgccttttctatgacagtctttacactacaagaaaggggctgcaggacaatcccagctcccaaagacccagcccagagctcaggaaagccaggctgcttctcaccaaaactgaaaaccaggacaccttgggaacactcaggaccccactcaggcaccagctccttccggcagctcttccttaccctgctgaagtgctgaccatccctgcccttgactcactcccattgcagtgccaactcagagcatctatccccaaagccagagtttctgggattcagatcttggaggtgtcacccattccctatgtgactctgtgggagctacttagttaatctgcaccctaatgtcctcatccatcaaatgtcgatgatgacagcacccatctcacagacttgggtaaggctcagaagagctaatataaagaaaatgcttagaacgtggactagaatagtaagcactcaacatacttcccatgctgttgttggcgccgctgctcccacttgtcagataccatgtgagaccaggagccccttgaaggtgggaaactttttctgtttacttctatggtcccagcacccagcacagagcatggtgcagaaaaggctcaaaatgttttatgagtgaatgaataaagcgaatccagttggcaatgctggactatatacagcttgacttggtgatggttaccttacagactcctcccctgcaatgttctgaaagagggcagaatgtcaacgggcaggcacactggccagagagaaactgagcaatgtgagaatggccaggggagactgggcattacagcaaaaaagactggcattgaagctcaccaactgggttgtcttgagcacatccatttcctcttgggcttcagtctggccatctgtgtgtctaaacaaaggcaggaactactagaaagatggggtatcatttcagcaagaacaggtggagaggtgaaacatgactcatctttctccacctgccccaggggactcccc[450 bp omitted]ctctgagtaaacaatccaatgatgctacccacaaaggccgcagatccaagcttaggaggcatcttcccgtcaatgccctgggggcccctgttgccaagtgacatgtgtctgtgattgcagaaggccctattctcccagaatctaggggaggaagggggactttatgcagctggaaaaggcaaattctaacagtcctttgtgattttagacatggtatttaatctcttttgaaatgccaaataatattaaaagagggcatgctgcttttatgatttttcaggaagggtcatggactaataacaggttgcaaacattgcaacattgctgggagggttcttgcccttgctgtaggtacatattgctgttctatttataaccaacatgaaaacaatgtaataatcagaactaagagatgtatacatccctttagcctacctatttttcttggatctggaatattttgggcctcacttgttgatttttagcagcagttgaaaggagctgaccaaatgcacattaacgagacgacattcctgtctctttctgtcttcactgggagacgtcctatttgagccatcctggtttgagatcccagcctcccacccctcaagcatgagacagccacgagaaggccccctgcagccacaaacatttgtcagagtgatttggtgaagttcagcagtgaaagcaatttcttactcggaaaatcatttatcatggatagcctgtcgaaaacaatctcatttcaaacccttcccagggagaaaagaactgacaactggcactaagtaatctacaacagagccatgggagtcattcatctttcctttgcccagcccaggacttgatgctttcagaagagaagtggaatcaatcataactgctctgaggggcttcaggtaaaagaggagggggctaccgggacagccacatactcctgagtgcacaatgggagattgttcagtctctattttactaatagccaaaaaccagaagagtagttgtaggggtctttgagggaggtgtgcctccttcattacaaaacatgttctttttgtacttttagctcatcttaaatgccagaatcctccttcttagggagcaattaaggaaaagcttattgcttttttatataagctgacttcccctttgcctggggcagtcttttctttgccagaccatagcatggagcttgtggcatagtagataatgattctgtgcatgccatttccactgacatcaacaccctggaaacagaatatctagcaatttgaggctcatggagaaaagcagaagagggaaaatttttccccattaagttccctgcttttttaaaaatacaattagttacagataggaaaagcaattgatcactttccttactgaatgtctgattaaacccaggttctggttttgaggttcaccaagccccagaagaagctaatgaatttcagggctccatcattctcatgttttggcattaaccagtgactcagaaggtactgccagatgcaaattatgacatcaatgctatactccctgggaaccaaataaaacagaaccacctttgtagatgggtagctcccaccagttcccagaaatatttatattatggatattagtacttcattagtacttcattattataccaatcttaactcagaaataaatcaccaggtttagcacatatgatgctttaagataaaactgtcctcaaactgctttcatttctctgtcattatcaggggtctgaaatcctgactattttggaaagaagtgttatgctattttgcccaagccaaatgcaggcattaacggtaaagttctgggataaaatgctccatttgaactgaattgttcacataaaatggctaatttctattagccatttgggagtacttctgccacttcccagctgtcactttaagcaagatactttagcctctctgtgccttggtcttctcatctgtaagaagggggtaatactgctacctaccctgtaagatgttatgaggattaaatgaggtgatacttacaagggccacagcgcctgccaaaaagcaagcatttaatttaatttttttttttttttttgagacggagttttgttcttgtcgcccagactggagtgcagtggcgcaatcttggctcactggaacctccacctccagggttcaagtgattctcctgcttcagcctcctgagtagctgggattacaggcacgtgccaccacgcctggctaatttttatatttttcgtagagacggggtttcaccatgttggccaggctggtttcgaactcctgacctcaggtgatccacttgcctcggcctcccaaagtgctgggattacaggcgtgagccaccacacccggcctaatttaaaatatcttttagaaaactctcagccagagatgaattagggggtaagccaaccactcggtttcctggtagccaatctataaagtccccaggagatcactggaaaagtaacaagatggaaaaatgagattttcagggtgagcactcactatacatgatcgagaagagcactataaaaagccaggtgtgaggaggtaaagctcccataaggacaagatcagagataaacaaagagtctctgaactgctaaagaggcttgccagggtccctgagccacctctacaacagttttcttcctcctccgcttccccaacacaaaggttagtttctctgctaaataaatattgaatacttacataacaaatatcaatttgaaggcacataaaattatgagcctgcccaagtgtcttcttggcctaccatgctctgagctaactggggcactgagtgtaaacactctcccggctactgctttgctctttccctccctcattattcaccacattcagtgaacagaaattccagcttgagccacctgtagtcatgtggcattggtccaaagccctcactaccatgggcgccaaccctaaggggaggtatcctcagcactcactacgtgaaaacctactttgcttgggaccaagaaaagaataattcagcatgaatacgacatcactggaacttgttagtgttatttgaaagatgtggctgaagttttacatagggaatgtgtgcttccatcacaagtaacacagtgtatacaaaactaacaaagcagtttgtggccaagaggtttttgttttctaggatgaataagaagtccatgttcttgaaggaacttgaggaacaatgactacttcaagtccaccctgaaatatggacacgatggaaaagcaaaggtgggtcatccacctgggaatctctagttcaatggttagctcagtaaatcttcccaatttaccatgcagatccatctcccttaaccccataaactgggctaaagaataaacatattgcaatttgggtattaatttaatcaggcatgattttgcagagaagcccatggcaaaaaaaaaaaaaaaaaaaactttctataatgaggtccaataccaaaaatagtagtaacaataatttaaaagcagattgtttaaaatccatctcttcctctctgtttctatccataattgaggaggaagagcatttgttcagcctactgtctgccaggcatgtgccaggagcttcactcatctcttcaccccagtatattattgctgttgtatggatggagaaaccaagatttgcagagattatcacctgcccaaggctaccttcctgggaagagggagatctggatttgaaccccacctcggtctgagtccaaagcctgtgctcttcccacattgtgctgctggccatccctgaagctgccgctgtaggtggagcatactccctgagacgaaccaagggagtagtggctatatatatatatatatgtacacacacacaaagcaaacaaacaaaaacaaaataagttggcgaggatgtggacaaattgcaacccccgcatgttgttggtggaaatgtaaaatggtacagccattgtggaaaatagtttagtgattcatcaaaaagctaaacattgaattcctaaatgaccctgcaattccactcctatgcatataagaattgaaaacaggaattcaaacagatacttgtgcacaactgtttattggagcattattcacaatagccaaaaggtagaaacaatctacatgttcattgacaaatgaatggataaacaaaatgtgtggcagacataaaatggaatattattcagccatcaaagggaattaagtactgatacgtgctacaacgtggatgaaccttgaaagcattatgtcaatgaaggaagccagacacaaaggtcgcaaatatatgattccatttagatgaaacatctagaagaggtaaatccatagagacagaaagcagatcagtggttgtcagggcctaggaggacagaggaatggggagtgactctgatgagtatggggtttccttttgggtttacagaaatgtcttgactaaatagaagtgatggttgcataacattgtgaaggtacgaatcaccactgtatcgtacacattaaaatggctaatagttacttttatgctctgtgaattttgccaggattaagaaaacaaaagagtggtaaagttagaagatatttcacaagttctctattgcactgcattctttgtggatgaggaaaatgagctgtcagtctgtccagtgcggaattacatagctaaagtttgccggtgaagttggggttagaagtcaaccctctgtcaattaatttatcagagcttgcacccaggctcacactggggctctggaggaaaagaagaacaatattgagagaaataattctttctcaagtgtaactgagagcctcccagttcctgcctctttggctcaaagctcatattcctgggaagtcatcctcccttccactccagggaaaatggcttcctacttttatgtgaaaaggagccacaaagaattcagcatcatgaaacacccttagctctatcaatagagaaatttctgtcttcaagggaagtccacttgatttgcttctgcttgaagtgaagcagataacctcaatcaacatctgattacttctttaatttccagagcttgctcattaccgaagccacactgtctctagagaaggacctagagtaactcagattttaacacacctgggctgacaagttacttagcttgggctttaattgagaaatcagttattttacccattattttgctaacattatcaaaatcctgtgatactcaaggccctgaaatgacattttcctctcctttatcatttgtacatgtgactaggagaaaattatgtgtgatggacatgtcgaagatacataagttcttgaagagattctttcctacttgctctactcactgatccgtttccactgaacaaattgagtatcagcatgagaagtcacaaggcagggggttcattctttcttccctggcttggctttctaaagcgtgtgagttttatattgttgcttttcaagatgtgaagttgtgtgtaaatttgtgtgcatgtatgatgaatatttttccctgctaaaaggtacaatgaaattgatagtgaaactttgcaaaccaactctccgataagcttctagtgtttttcttttttttaggtttgccactaatcctcccagcatttctgcagattgtaactgaagctcagcttttctaggaggaaaatacctgttatggtcaacaacctaagagtcactcttgattcctctccattttcaactaaacagctgctctgtctgtgacgcctccagcatgtgctcacaccccaatggcctcggacctctcccaaggcagcatcctctcagttgagacctaagaaaactgcctcccaaatattttccttgcttttgtctttccctgaactctattctccacatcacagtcattatttgctaatggctttattgagttctagtttctacaccatacaattcacccatttgaggtttaaaattcaatgggacaatcaattttaaaacactttcatcacctcaaaaagaagccctgtagccttcagctatcaacccccaatctccccacaagcaaggagtcagtaatctattctctgactctatatatttgcctattcttgacattttacacaagtgaagtcatatactgtgtgatcttttgtgactagtttcttccacttagcataatgctttcaaggtacacatatgttgtggcatgtttcagttctccattcctttttatagccaaatggtattccactgcataagcacatcacattttgttaatccagtcatctgttgatgggcatttagattgtttcgctgttatgaatgttcaagcgcaagttttgtgtggacatgtattttcatttctgttgggtaaatacctaggagtggaatgtacatgtcatggtagctctgtctttcagtttttcaggaattgccaggctgttttccaaagctacagcaccattctacatcatccccacgagcagccacaagggttgcaatttatccatatccttgtcaacacttgttatgatctgtcttttcaagtatagccatccaaatgggtgtaaagtggtatctcaccatggttttgatttgcatttctctgatgactaaggtgttgaacatcttttcatgtgcttcttgactatttgtatatcttctttagagagagatgtattcataaactgaccatttttaaactgggctgtcatttcactttctttgtaatgtccttccattgaaacacaaatgtttttaattttgatgaggtccaatttatctactttttcttttgttgcttttgtgtttggtatcatatttaagaattcatggctaaatccaatgtcacaaaggtctaccccgtcttctctcctaaaagtttaaatgtttttgctctcacatgtagatctttgatctattttgagttaattgatgtgaagagtccaattttattattttgcatgtgcctatctagttatcccagcaccattttttttttttttttttgagacagggtctcactctgtcacccagactggagtgcagtggcacaatcacaactcactgcagcctccacctctcaggctcaagtgatcctctcatctcagcctctcaagtagctgggttcacaagcgtgtgccaccatacctggctaatgtttaaaaaagaaatttgtagagacagagtctcactatgttgcccacactggacagcatcattaattggaaaaactattctttcctcattaaatggtcttggtattattctcaaaaattagttgactataaaaactggatgtatttctggactctcaattctattccactgatctatatgtccagaatgactgtttaaaagtggaaattgcattattactctttctaaagtaatagcctaatgcccaatacaagtcattctctatcccaaggattcttcacttggggccatatacttccaagaggtccttgtgcagtactcagggagtccatgatttggaccaaaaaaattacatctttatttttattaacctctaattcaaatttggcatttcctttaattatgaatatagcaataaactgtagggagccaaaggcccatgggacatgaccaactcagcattccactggaggctatatgatcaaacagcaaactgtttatcgtgaatgcagaatgtgagcaaactcaggactgcgcatgcctccaggaggtttgctaagggccaggaggtttgctgggctccttaaagttatctactgggaaatctagtgcctattgtttgaagaatgcagtcttgcaagcctgctgtgattcaaactgctggccgacaaccacctgcccctttctcgttatctcttttacctaataaattcggaggaccgaaacagctcagggcccttgtccactagaggcgaggtgcccccaaccccttcttccaaatatactctcttgtctttgacttttattccccagttagccccactttgttcagtccaccagggatcatggcaggttacaagtggcaccccgaacagtgacagaatcaggtgttctacaataaattagaacagtattaatgacacttgtaactttttttagcaacagaaatctcagatatttacatataagattacaattgttacaggtatctcaaagtattacttatattaatcctactttaaaatgatggtggtatattagaattattgctggatcttcataaaaatgccctaatcaagaagcaagcagactttatcataatttgttttttataatctgataactgattttaacataatctattttcttataatccaatgtttttatattatgcctttataaataatatttttctgagaaaggggtcatagtcttcaccagactgccaaagaagtcctcagcacaaaacatttaagaaaccctgctttttccattaccagttttattttcttcccagcacatggcatcaactgaatttatcttatttacttgtcaacttgtttacggtctgtctctttctgatactggaatgtaagtgcttagggcttaaaatagtgtcaggcacataatagccattcaataaatatttattgagttaattacggaatcagcagcaattttctaaacaagagctaaatcattggcttaatgaaaataaagactactgataccaaattagtgacatgtaatccatactgaaaattattttacatttatgccatcatcatcattagatttaataaatgccagcatgtcctatgtgctgtattaagtgcttgatgcacagtatctcattcactattctccatactaacaaccaagaatatcattaaccatacttacagttaagggaactaagcctcagagaggttaatttctcactcaagttcacatagctaacaaatgacagagttgggatttgcaaccaagcctacctgccttcagagtattgatttttaactacaataaaacacttctaagagaggaggaattttcttcctgttcaactgagaaagctaagatcctgtgaagttaagaaatgtggcccagaacgcagagttcagcagagatttccaataaaatgttctttccactgttctccttatgagccacagcaggaaaaccccttagcagaactgggtgctatcaggttgcctcctacgagaagatgaattttggaagaagcataattaatactagcaggcattaactgaagcctgttcttttctttcctggggtccagtctgcttctctaaatattagggcttggcctcattcagggcattaaggacttcattaggctgaaatccaagttaatttgattgcacaattataaactgtccctggctggaggttgtctcatttgccaggttgcaagggggcagcatggctggatgacatgcttttgatccccagcttgaagtttcagtgctttctggctttgacctcatcaagttttacagaaaggaagttaaattggagcagggagacagatattctccttactaaagttgtcacgggcacacagaggaccattcatcaggtctgcaaagaaacaaggcacaggaaaagtcctggtcacccggaggtggcagcaaatgagatctaaccaaaggtccattatgcccaaggtcactcacccacatggcaagcatacatccaggctgacccctttcctctttcctgtgcctcattttccccttactggctaacaggttattcagcccgggtatgcagaggagccaagggaaggaataaatcgcttcgttttcaacagggattttgttgacattagtagaatctggaagcatccacttcatggagtagcattttcctctcctctgctattcatgcaagtgatcaaaggacccacttccagccttcctcaagagaggcctctcctccagccaacaaagtcccttcactgactatttttgtaaagacattaactttgcccaaagagaggcctggccttgtcctgagcttctgggaggcaatgtctaagcccttggagtgtcatgcctgataaaagtgtcttttccaggggtcttgggctggccagatagtaacagtgttattttgggtaggggctgaccatgccagaaagtctaacaatgtcatttatgatggaggctttgggttacatggtatccatccacctccaggggagcaggggactgaggctggccatgagggcagtcattcaagtttacatgatccagtcccagtaaaaactttgaactccgaggcccgggcgaactttctcgattgacagtactccttgcgtgtagtcacacattgatgctgggaggtaacacgatccatgactccacatggaggagataatgaaagcaccatatttggatctttcccagactctggcctatgtactttgtcctttggttgattttaatctgtatcttttccctgtaataaattgtaaccgtgagtataatagccttcagtgagctctgcagtcctatgcattatcgaacctgaaggtgacttggggaacgtgccaaacctgcagttgatgtcagagggaggatggtcttggggactgctcaccccatgcccctcttctgcagcatccaaattctacccatgccttgggacccaactctagcctgccatccttccttaaagttccctggattactgcaaccagcaagtatgctggcttctacactaaaagctagtgtttcttaaacgctttttagcaaattccacagtaagaaacagagtttacgtcacaaatcagtacatttatacagtatacatacgtttatacagtatatatacatttatacagtacatagatctatatatgtaatggaaacaaaagtttcataaaatcaaattgaacttctctagctatatttccatcttgggctgatcaatctcatgttttatttatttatgtatgtacttttagagacaaggtcccactctgtttcccaggctgatctcaaactcttggcctcaagccatactcttgactcagcctcctgagtagctgggattataggtaaaagccaccatgcccagctgtgtcatcttttttaaatgcttgtttttcctttcacaaaccatgaatgagttgagattgcagttttcagaagcacaggtctcgtccattattctgataaccgatctctttactgccttacaatacatcttattttgtttcttaacttcactgtgtttatatctcatctctctcaagacctgattaaaagtttcaaaacagacctcaaaaagaacaataccaataatatctaatactttttttggtcatgttcaagctgggcactgtactaagagcctttccatgcagtgtctaattgtttccacacactactatcaggtaggtattatccactatgacatctctcatcaccactttcaccccatgtgacaaaggaaagacttcatagcttggaaaggttaactggcttgcccaggacagctacaaagtagtagagccaagtaagccaagaaggtctggtctgattccaaaccctggtgttcaccactaggctccttcctccccactttctttttgcaaaattgtttttttaaagacagggtctcactctgtccctcaggctggaacacagtggtgcaaccagggctcacttctgcctcaaactcctgtgctgaagccatgctcccacctcaggctcttgagtagctgagactataggcacataccaccatgaccagctaatctttaaaacattttccagggcctcactacattgcccaggctggtcttgaactcctgggctcaagtgatcctcttacctcatgtgagccaccctgcccagctacattcccacccattttcattccccgccagagctgcccagcagacctttttgccccagagtggaaagggcacagatgacaaatatgaatatacaattctggcccagtgggctcaaagaggagggagttggcaatgtttcctcttcagccagcattcttttcaagcaaagctctgtgaccttctacccgaaggcagcgctctcaggcctgtctgttgcggttcccctcactcatctcaggagagtctccttccagaatgccaggcacccctgcctgcctccccactgcctcgccttccctgcaccaattaaactgtcacagtcggctggcttggaggcaggtgaggtcaggaagaaatctgaaggaagctgggaattcagatgagatgaggcctccttgtgctgaagctcctcttctgttttctgtcaaactggtctgaagactgattggatgagcccatagagatccctggcgactctctacactcacctcttcctctccaatggagggtgagaaatacggccttgtacagaagtggcagcttttgcatctgtttgggtacccagtggtccctagttcctggtgcaacagcagtgggtctcgggtggaatgattttggctggagattgtttgcatcctggaatcattgcctaaagaggaatttgtcctctacaaacaagtgctaacccacaatacacaagagaagcaaatcaaagagctcttaggcttggcctaatagatgcatcttgtcttacctaccccttttagtgttgtctgttattggaggaagaggtaggaagcccagggcctccctcccagagtttccttagcatcacctgtcattgttgagattttgaatgcattgcaggttaagggacacttgatcaagaagggaaaacacagcagagactttcacttagacatgttttgtatgtcatgcagggaaaagttcccagtcaacctctgcttaaccttcgggtttgaagatggccctctggcagtcacctgatcttcatggcagaagaaacaggagtgaatgagcagatgaatccatcttaagagaatagaaatccttagtttgggtttcattgaccaactatagggtacctggcaggcaaaatttttgcagctttcatccaattcccaaatgggtgtttgacccacaaaagaaccaccaccagtctacatggtaatatacatacattgccttctataattttacttgctgtagctgccaaatcttattcatacttcctccaagcataagcacatgcatgcacacagacacagccgccaaatgcaccctccttgtctactcctcagcctcacctcgtacctgataacagattgtactcaaaggcactggaagaccacatggctgcctggagcacctttcaattattaatgctgttctttaaaggccttgccttattatttctactcatgctattatgaagagggcaaactccttaatgcactcctgtgccacttcctcccactgctagaggaaaagcacatgctaggtacagtcatctaatagcatccacgttattttcaccttctctgcacactgtccctgcagttctctctggggcctcaagatcaattgtatctcaaactgggccatgggttcattttctgcattttctggcatggagtgagggtagcgggtgtatggaaattccagctctcaaattacaaggtggcaggtctctgcatgggtgtgatgagcaacatgagataggtatccttgttaaggacaactgcattctagtagattccaccatcagaggtcctggagccctacctactatttcttcctgagagtgtcctgataggtaaaaggtggtgtgagtgtcttccacggggaaaagagactgatgaggcagctctactgaaatggcagttgatattaatagggccatctacttcctactttgaaaatatctgagctataagctcagacgctacctatcactaactgccaaatttccatgaaaaagggtcagtgatgaagttgtagcctagacttgggaccatgtctcaggggaaaagtctaagtatgcctccgattttgttttggaagggacgacaccgtaagaatttcatcagtaaatattaaatacaaagttcagcaaattgtgaactttagggttcatgaaaactaaagccaggatttatccatgtcaacctgtaccttatacctacatatgctagaaactaaatcaagtttcatacaatgtgcccatttagctaagtaagtcagaggatagtttccaataattactaacacttacacacttagtataatcaactcttctttggtcaagttaatatcctggcagaacagacagatttgggcctctcttcttataaaaaaagaatctgacaatttaaggggcatatgttcacttccatttatgtcctggaaaatatgccctgtgacttagcaaccatgttttaaaagctcttgcagttcttaaacaaacagagtgtatgtttatgagcttctaacaacgttattttcagagatgatgtagagttagtgatatgtagctctggggcttacagtaagctgtagatgatttattggtgtggcatacagtatttgcctcgagaaaaatggaaatttaagcagtgtttgaaaatgtgttagatggcaaacgacccggggcaccctgagaccaaaggcttcccatcttagagagagaaggggtcctttttggcagatggaggagcaagggttaagaacgtttcctggcactcagggagcacagccaattcaagaccagaaagagagacagtttagaatagaggctgaaaacaggaggcccaaatctggcctgcagaggtgttttgcttggcctgcaagtactttaagagttttggatttgaggccaatattttaaaattggagattcaacataaaatgcagtattctgtctcctctttgaaacacaggaagatctggccactagagcctgcatttctgcataggaacaatcagctggacctgggaagccacttcaggtgaggcttcagctctcattgcagtcctcaccagatccgcctcactcatttccaatgtctgcccttccctgtccagatgaatttgcaaacatcagatgaaaaaaatgttattttgtactgttgcactctcagcgaacagatctcttaaaccagtaagactcattgtcagataaaagaatggaaaaggcacatgtttttccaaaactcgggagaaaagcaagactattaagttgtcttaaaatttttgttgtatccattgttttgaatgctgggttgctgaagttcctatttcccaaagccaagttatcagacagggcttaaaataaaatgcttattttaattttctcatttgaaacaattagaccacattgaaggggtttagtataaggcatctgtctctgagcatgttttcttatctgtgaaaatttccagaaggatggggctgttggaaagggagaaataaagtcaatttctccagcaggcagtgcaggcacagtgcctgaggccactgtacttatgggacacaaaaaagtctaaattttaacttctttaaaatcagaagaaaataaatataataataaatgacgaataataacaacgaatccaggctgggcacagtggctcacgcctgcaatgccaacactttgggaagctgaggtgggaggactgctagagcacaggagcttaaaaccagtctgggcaacacagtgagacccccccatctctacaataattttttttaattagctgggcatgatggtgcccagctgtagtcccagctactcggaaagctaaggcaggaagattacttgagccctggaggcagaggttgttgtgagccatgattgcaccactgcactccagtctgggaaacagagtgagaccctgtctcaaagaaaaaaaaaaaatttgccagccatggtggtgcattcctgtaatcccaactactcaggagactgagactgaaggatcacttgagccaaagaggtcaaggttacagtgagctatgatcatgtcagtacacttcagcctgggtgacagagtgagaccgtgtctctaaaaataatagtaataataacaacaataataaatccagcctggattatattcattcttataccaatgcagccgcaaaatataatatttaatattcttatggaagaattggctcaacaaagccaacgtacctagagtccatggaaatcacagcacggagctggaggcaaatgctggtcttcaggccaacaaccatgcccacactgtggcctgtttgcgagcagcacaagctcattttactgcagactctcctccccatcatgcccctgtgatgctctgtatgtggcaagttcgtaacaagacccctgcaaagcacgtcgcacactgacctcagtttcaaaaagatggagtggatgccattcagatgcttctggaaatttccaaataaaaatttccaaaagttttaatcatctatcattggacaacaggtattactgccactggatagagtccgcttctctgattattttatgccgtccctgaagcattctcaatccctaatctcagtagctgatttcaaggcaaggttttgcttgactttagcgtatactgaaaatcacaaagcccgagtacaggccataatgagagtcttctcttgtggactcctagagttgagggcagactgagttttctgtctattcaactcaaaatctcccctacagccaaaacatgttatagcatccagctatcttttcaactcctcaaccttcagcacttactgtgtgcaatgctcatattagtcattgatatattgcttagcgatgccttacttgttcttgttttgttatcttatttttcctttatatatggctggacttcctgccccttgtaaaaatatgtataatttaaatgtcttaatggaaaagatctagcattatacataagtactcaaaattccccagtacctagcaaaatgccttatacacagtttgtactcagtggagagctattatctgattggtacctttaaggccacaggtacacagacagctctcagcctcatctctgctactgtgatgagcctggtggccaattcccccatgctcttcttctccacttaatttttaggcaggacataattgtttcctacacacacacacacacacacacacacacacacacacacacagagtctttctctccctctctctcttttctcccaaattctatgaacaaagacatatgcatcaaaaagtcccaagggcattgttgctttgagagttctatttttaagccacaaatgactcatcaccaaccagggtctccccaaagctacatgtgtcaggctgtcaggtcaaaagacaaggggtaaaagacaaggaagagttcacatctcctccagcccatgaaccccatgataaagctgtaaaagctgccaccactccacacaccacaccacacccctaccacagttgtgttaggcacaagcactgcccttgtgtttggattaaactgttctgagctataacatttcgctccagctggctcctatcctgatctctcagcagtctctgaatgcatgtcagcctgtgactatagggaaaggcccagtgccatgtgacagggaggagatgcagccctcttgcggtataaactcaggcttgttgtagaggacagaagtaactagtgggctagtgggtctgaaagggaatgcatttcttcatttgccctgaaacaattattcttttaaaaagaataagagagggctgagagagtgccaggttgtccaaagcattctttttaagttttggagagtggcgagaagggaagaaataattcatcctaattttggaaggcaaagtagatagggatgtatagacatagttatcagatagtgtttccacaggggaaacaagtgagcaattgggcaaaatgtcctcaaaagttatgcataacaaattccaaacaggccaaaacaatgtgttcagctcttcaatgcgttcagccctgtgttacccttccacagtggagctgaactcttaactcttacccatccccaactccatgctgaaacagtacaaaaaagagagggagacagtggggagggagagagagagattagtaggagggtcataaaatcaaggaattcaaggcctctcaccagtgaggatgaaataaactaatcccacgcagccacctggctggatttgatcttttccacctgggattatctttgttctttcccatggccctaaagtttcccccatgataagggcctagaagtccagaattggcataaaaagacaatatatactttgctattcaatgagtaggttatcatgtctttgttcatttctgtatttagtagaaagaacccaggagatcaagtagaaaaggactgggagagaaaagttctatcttccagctccagctctgcccctggctggtcggatgaccttgaggaggtccctcatcctcattcctcaggaaaggatgctgaggctcagagaacagtggcaccagttgggatccaatgcctctttgactctaatactatattctacagttgtcttttgtggcagacctgaaaggttcagctcagtcctcctgtcctttcctagcatagtccctgatttccccaatgaaagccaaagataagcagttcccttaatgcttctagatgccattgcctacgatgcctaggtaccacttgtgcaatgacaaataagcaaggaagacaagatttcctcaccaatgtggaagggagaaggaggaagggtgctaatgctctgaactttgacgtaaatgaaaccaatctgtttgacaaccaaagaacagatcctgtccccaaaatctacctatatggagacaaggacatataaagaagttgactctgttccttggcatactctccacctgtcttctctaccaggctttcactcgattcctgaacaaatggcaatatggaaggtcagatgagctaggaaggctgagttagagttactctcatatcagagcaccaagtgttgctattaaagggtacattctgaagggagacaagacttcccattggagttatttacagcctctttgccctgaaggcatcttctcttccaccatccctgagtgggctcggctcctctaccatctgacattccattctttcaacagctgctggctctcctgttgtgttcccttcacagatgtgcagtgccgttctgaacatcctgcccttgaactttccctacccataattttccaaaccaaagcctggcaataaaaatgtcagtgagggatggagaaaactggggggagtattttaaaaggaaaaaaaaaaacagggaggtgctttgcacacagtgatttgtgttgacttcttcaacaaaggttaaatgcatgccgtgacttctcaaaaaagggcatgaaggcagacagctggagctaattttccagaacactacctagaaaggctgtatttcataaaggaactggttacagagtaggctggtgagcttccttttccatgtcacaggctgcccatctcatcatgctgcaggatggggtacactaaaggggatagtgaaagctggtatacacagtcctttacagtttaaaatgcgctgtcatgaatgggatgggatctgtgctgtcctcacagctctcccaggtgcctgtcttggggctgagcacaggagaggcagtgggtctacacctgtgcctagtcagtttgaacaaggctggagaaggaagccagatactttatgacatttcaaagacctccatcctatgtggctccattctttggggccaaattttcctgaagtccattagtttgataataccaactctctgggcatataaacattgcataacataatgcaaaactataacaaatcaactaattctgtaactctctaaaagagataaaagaatgtatctcatggggaaacagcatttctcatatctatttcagtatgccaaatcacaaggacagattaggtaaggataggaaggccaaagagtctttctacttggaaagacacccctaggtggtggaagctaatgaggaacaatcagctctccttgttttttgttcatttgatcctatctcattgcaaaatgctgccactccactgagataacagagaagctggtctcatcaagccattattaggaagaactgaatcaaggcccaaacagacatcagacagcacctgacccagggcagtgtcttacatggaaggcctgtgataggagcctcctacgtacccacaactgcacacttggttctcagggtgagaaatggagaaagggagaacaaaagagaaaacaagaccagtgcattggcaggatgaggtgatgcaacttcccattcttgcaacatctcattaaaccccatcagttacttacacaatctggaaatttacttcttgacacttagaagagagatggctttagaatgagccatgctggaatctaatcctggctctactgcttactagctacatagcttgggctatgcctgcagcttcagcctcctcatctgtaagtgggaatagtaatacctatcctaagaagttgttaggggaattcaatgaggttgcatgtgctatttttggtaaagtgcctagctctgtagctcacagacagtacataatcagtgaatgttagttccctccaacgacttgccctctcttcccttttgaaacagaatttctaggccaagggatgagagaccaggctatgtgaagacaggggagggagaaactactgggcaactaaaccagttctgctaaagctctggacatccccaatacatcaatggtgccagttttattttcagagactatgaaaacaatctggtcaatttctatcgcaatcttaaagatagttttccttaaccataagcaattttactgcctggaaaatattcagcattatcacatttgaagatgttacaaactaataaatgaatacaaaatgaataaatgggtgagtggatgcaaaagtaacattttaaaagactggggagaggccattttccaatcgtaaccccactgttgccttggcaattgtgcccttggatgagatgctctacaaaatttgtgctgccatttcctgctccttcctaacgtccatatccccaaaacagcagtgctgataccagaagccaagagcaaagactggcaaaatcagcaagtgcccccattgtgtgccagccattttggagcagataaagtcattaaggaaacatttaacaacgtataacctttcagctttactctgcaaacagcaggtagcttccctttcagagacaagagcctgcattgaagtcaccagtgagcaggacttgaccttcattttcagtatacgccacattaaatattcataatccgcgtaaccgtagcataagaagtagcagcgtttaaacatgaatcaaaggaataaatatcttcacacatgtgagtcatcctttcccagaatgcccctggtgaaaatgcaaatacccagagctctgggcctctgtctcttccaactttctcttgaaattctgaaagctacagggactgctgcattatgcaatccatgaatctcgctctcatgctgacactggtgggtctttgttttttttccttatctgttagataagaattgctgttcttgtgtcaaagggaggaaatagacaaggatggaagcagcaatggtgacattagcacccacagggcgtctgcaggcactcttgacttggttgtacaatttctaaaaaatctttgcttcacaaggatcagaatatgtgggaggacagggttggcgttggtgtcgggagacatcagaattaggaactaaagtgacgtgtgacataaattgggcaggagtccttttaaaaagaatgcaaaagaaagggagctttttgtacacaatccacctcgtgtggctaattggagatctttggggagatggtgtgtggagggctcaatgcttgtctgtgcttgttaaggcactaacatgatgtctgaccaaagactcagtccagaggcatcttcctctgcttgggtgtttctagagagtctactgctgggatgataaagcataattttagtaaggtttaacgtaattatctttggttttcaattccaggagctctgaggacaatctgtcttagccagatagtaatcacttgcagctacacaaatgagtcttccctcacaaccaccctaggttcattaagatcagacccaaagaaaacgccctatgctgggatctgtctttgcctaatggccaaaaatgaaaggtgtgcagctgtctttggaagtgacttatccatcacctctggatagtaaaaagagctttaaaaggttaaaaagatcataaaccaccaatgatgacctttctctgagctgtattgctaatggacagaagtaaaataactacctagcctgcttgtccacttgcacaactggagctggcctgcctcgagacatagctggtccagcagacctagggagcctgttttatacattaatcggcattccttgcacttttcaaagggctgggtgcagagagcctggaatctcaaacttgtgctacaggatagtcctcagcattctggaggggaggggcagctctggctaaaattcactgagacaagccatttcacgcatgtctgttggtttagattcacttgtgggaaagcctatagactgtcccctgattcatttatttgaagggtgtaaatactagctacaattcatctggagaattctgggtgctttttttccagggtgatgatttagtataacttccacgagaagtttaaagctgtctttccaaaatacccagatggccagccaaaccatgaatgtgtaaaactggtaacagttttgaatgaaagacatggattttaagaatgtacattctactttctcactttctttccatttgcatcttatatgtggatagaacttcatttttttttctcattcactaagctcgattataattttttaataggtttcactgtgttttattcctggaaatctatggacttaccatagagatggctttagagattctacactaattctctcccaaactaaaactgagcttgcttgccgtctttcccaaggaagatggaaaactcccttgtgctgaatccactgattgggcctgccaccggacagaatcttcggatatgctctcagaacaaaatgaagtcatgaaaatgaaaagtttctatataaataaccagaaggtcttcttataaacaaagccttgctatgccaaatcacacagtttagcaacagagaagaaaggctaaagctgggatgaggctacgacagtcctcaggcagaatgggaatagccttgtttctaaccttatgggcatttttgccaggaaaaggtgaggacaggactgaagttccatccttgggatagactatttgcaagttcataaaagaaaccagaatcagagaggactcccagtgccatcttcgccaaggcctagaaggatcacaattaaagccaaaggacattgagatggtgtaggacattaggggaagagggtgcattggggaatttcattccttttcatcttctcacacggaaacagagaacaccaggatctacagaacaaaagactgcctcatagtagactgtaaaaaaagacacaatccaaatccatctaaagagcattttatttctgagaaatacagagggacaaaaggttaaaaaaataaaaaaaataaaaaaacgaaaagggaaggaaggtgctggctgaggcatctggacttctaacccatcaacacactcacctccacattagggttttctttctctgggacatacaagcttcaagcccaaacctctttcctgagtctcagcatggaagttggcagggtctgcaccccacgacatgtaagaacacccctggagagagattggagaaataagaccaggggctttagaggatcttcagttcaatacaaataggatccagaatcattaacagtaaatatttaaaagggggcttaccttcaatgacatgccaatgggagtcttccaaacttaaacaagctcttctctttcttggctcgggagagctgatggagggagcatgtggaatcttgtctcctgacagcgtttaaaggactctccatctgagatgggtgagggcagcccagcctcgcatgtggggtgggctgaaggacctctgataggcttaaacttggctgattcccagagacaggttattaaaggagatatttgctttgttttccctgactgacattttggcctctccacccaaatgcacaaaatccttggccggtgaccagatggctctgagaaattctgagtttagctgtgcatgaaattaccaccatcccaagccacaggaaaggagcactaagctcagaattcaggcacaccagagtctgagccaacaggcacaccaagcaggtttcctagtatcaaagtctagtagccaaccatgccagggatagagtttaaagttcaaaacactcacacagtggacaataaaggcaacaagctcaaggccattgtcaccagagttgccaagttcacgccacaacagaaaatgagttagactccagcttgtttcccagatgccatcaacttcatgatttgcaatagtatagttggaacaaattatttcctcagggttggcacctgcaggaatcagggcagaactggctgcaacattgcagttctagtctgtgccctcttcatccttctgcaaggtctttatcatctgtcacccaggctcactctggagcaccagtccattcggctggcacccaaggagtctgcatgagtgtccactctagaagtcctcaaatggccagggcctccacctctgggggtcatgatgaactcctccatccatctccttaccttcacaagtcaagaagcaccagcgtgcaatgcttcagctgaatacccgattggcaggtgaaaggatagcatcatgctttctaatctgacctccagtaagatcaaagcattggaaacccaattgagaaaaggatcctacaaccatagcaagaatggctcagaccctcatctgtgggaaactgtcaccctcccagaagttgcaaattcccatcaagtcatcttaactacttgacatcttcagtgcaaatacatcattaggaaacagctctttaaaaataagtaatacccagcaagaagacttgacctcatatacctcaccctcctatgccagcagactcaaaatagccttccttctgagaactttctttcccatttagaaaatcagtacagtacagcactagcttcctccaaaatcttctgcactcagaaggtcttgcaaaggttggtgtcaaggtaaataaatggatcaatgtaaaggctcatgattgtttatgaaacgagggcaagaaagtatatttgaatactcactttgatgaatctatgaagtatattacaagtgcaccgatgctgagagcaaagactaagacaacctgtaaaagaagaggagaatgccatcacttaagagttggacctcaggatgtttgggttttttgacacataccgaagcagctttgaaatacggtgcccattgcccttggggacctgcttggaaatctcaccctcatccccagccccccattactgcttcaggtttggctcttcatacagcaatgggcagcaacctcgctccttgccaataggggtcagggtagccttttatgtctcagggcactgggtttttatctgaccctgttatctcgaagtccagcttctctgcaattgtagttgataaacttcagtgggaaaaaagcaggtgaaaatttagggtgatacaatttttaatattatatgtagtctaggatctgcaggaactccaatagaggaatatcaactttaacagcttcattgaggcataatttacataccacaatattcacccatttaaaaagtacaattcatcaatgactttagtaaatctactaagttatgcaatcatcactgtaatccagtttcagaacattttcatcatcccagtaagatccctcatgcctgttaaatcaatcccctttcccatttccaagccccagaccacactaatctactttctgtcactacataagagataccaatttgaagatcacaaatttgctcgtacaaatgtccgtgtgtgtatgtgtggacatacataaagatatattcactgcatgtatgatctatatgattagaacacttctgaaatatttaggaaagtagttccagttcaggaagtcaattaggcaatccattaggccagttatgtgacaatccttgtcctactttacactcttcactcaaaattaatctccatggatggaagacagttttggcatctccttcagtggatacctgtcatgctaaggtccatagaatgaatatgtagcagattaggctgacactgacacttctgtcctcagtacacattctactttctttaatctttcacagaggagactattaatgcaaataaaggatagtcagaaataaagaagatgctttcagccaacaattaagcctgagaataaaaagtaagcaccaccattacacacaatgcctggctgctaggtcaacctttccaggtatgctaataccctgaagagactgcaggctgaagggcattggaagtcagtctcctcagtgtccatctattgacatctctcaggccttggctggtgggtagagaggaatcccaatttatgtaaagactaagcatgatcaagctttgtgtgtgtgtgtgtgtgtgtgtgtgtgtgtgcgggcacgtgtgcctgtgtatgtatgagagacagaatctctctcttttacacccacccacacacacacacactcctgtattttttatgtgtgccaaagtggctgacagaaaatgaaatctgcatgagatactcatttaaagcattgcaaaactgcatggagctcctggggcagaatggtggcttgcacagcccagaaaatgaccattaaaaacaattggacactgtaaaaggaatatgcagtttcatagcaactgataaaatctccatataaagggaggtgctaaaacaatacaccactgaggtttatttcattctgccatttaaaaaaaaaaacaactaaaacatgctccaattgaatgctgcagtctatcagtaattatcacccgcccagcactaatccctcttagctgcctcacctcaacccctcccatcacacatattcattcatatgttcctttcaaaggtacacacaaaaacaagcaaacaaaaacatgagcaggccttcgctttttcctctattatctaaaggaggcagcaaaacaaaaagcttaagattaattttgatctgtgctgctatttctgaggcataagcagttagatcctggccctgacctcattctcaaaaagctgcaaagagaaggggtgtggccagaacccaggagaagggcctcttctccattcataaacagctgatttaagactaatccctgtccatttggctccctgtgtgtgtatctgtgaatgctgagcatctgtcagagctggctatataggcctatgccacccaaagccactgttgcagaaaaggactggaaagaagcccttgcaaatggcatctacatcattctgtaaggaactcaaaatctaagacccctgcaatggcaatgatttcgcagcatccagatggccaatgtagctgatcctaatttgctccagctgcctccacttggagtcagtgatggggactaatgcattccttatttaagcaaatcagccagtgacaggaggaggccaggaatcctgctaccctctgaagatgaaaactcaaatatcagcatctctctgatagggtaagagagggaagaaatccaggagggaaataacctccacagctccctggccctgaagactctgttgaatggacatgcatttgggtccacgtattcagctggaaggcctcctctcaatgagatacaggataggcaaactgccccatgatgtacgatgaaatgctccctggggagatgatctgcctctcagtattaaggtaactgtgcacgtagtcttgaaacttgctaaatgcctctttatcgtgtcaggcttgatcacattgtcagcccagatccaggtgctgcagaaaacacatcaatactttggatgtggccatgaaaatagaatccccatcagagacttgtcttctctaggcccctagcaaagccaccttagaagtgtcagtttagtctctctctttctctatctctctaacaaatccccattgtctgagaactctaagtttgaaaacacaaaatgattacattttagtctgcatggtaatggtattattatagagcaccccaaatagtcacctaagtatttaacatatcctatacataaggcccaagaaaaacagaagatgggaggccacttggagtcatgaaatatactcttttttttttttttttagacagatcctcgttctgtcgcccaggctggagtgcagtggcgcgatctcagttcactgcaacctctgcctcccaggttcaagcaattatcttgcctcagcctcccaagtagctgggactacaggtgcctgccaccatacccggctaattttttgtatttttagtagagagggggtttcaccatgttggccaggctggtctcaaactcctgacctcaagtgaaccacctggctcagcctccccaagtgttgggattacaggcatgagccactgcacctggcaaaatatactcttttttatagagtcattcttctgtagattaatcccatgctattatgcaattagtgataaatcatatagtacaggtttagccaatataaaatgaactattgcctagatggatcattagtaactgggtaaagatagaaaaagtagggcccttatctcaatatcctctcctttcccaaaatgtccttcctttctacatagtaccactactctaatatctcttcacgaagggctgaggccattgggaatccttttgcaagcttctatagtttcagggacaaggaggacagaagcccaagggacatggtaaaatgaggccaaggaaagcacagtaccccagaaagcaaagcatccctgccctacagcagctgagtcatagaataagacaataaccaagcatgtaacaaagcattgtcccacacaagggcttgggggcagcagtgtgatacacagataatttgagcattgcctcttagggcacttctgctagcttgcttgagagcctgtcctggttgctaaacttgccatagtctgagctcaacaaattacctcagccatcttggacagtatgaattgtcaccttctcagatttactgaaaacacccatatactgtgtggagatattgagtactcggtgtgccagattcctaaaaacaaaagcaatttgataaatgtcattggaacaatggtgtttgagtcatctattttcaaaactccaagatcaaacaagacatgtgtttgcacaaaagaatgccaggaacacacatacacggtgtatttttttttaagggcagggtgcagtggctcatgcctgtaatcccagcactttgggaggccatgacaggtggatcacttgaggccaggagttctagaccagcctgtccaacacagtgaaaccctggctctaccaaaaaatgcaaaaattagcagttgtggtggtgcacacctgtagtcccagctacttgggaagttgaaacaggagaatcacttgaaccctggaggcagaggttgcagtgagccaagagtatgccactacactccagcctggacaacgaagtgagactctgtctccaaaaaaagcaaaataaaaaaatataaaagtgggctgggcatggtggctcacacctgtaatcccagcactttgggaggccgaggtggggggatcacgaggtcaggagttcgagaccagcctggccaatatggtgaaaccctgtctctactaaaaatataaaaagttagccaggcatggtggcgctcacctgtattcccagctactcaggaggatgaggcagaagaatctcttgaacttgggaggcagaggttgcagttagccgagatggtgccattgcactccagcctgggcaacagagtgagactccatctcaaaaaaaaaaaaaaaaaaatctgtccctaacacctgatgcaaagaaggagcctggtgcaaaatggggaggagagaggggaagtccatagccatctcgctagatgaaaatcccggtggaccatgaagatctttcaaatgtctgacaaggttcatgaaagttcatgaaaatggacaatagcacagccaagcatagactattccccctcaggtgatggagcacttcaggaaaaaggcagattcagtgatgtgagtatagaggtgattgagttgggaaagctggctcttagaaatatttcctgttctagaacctggactggagttgctgcaattaggcccatatgctttcagcgggtgtgtgaggcttcacggccttgggaggcagattcagagccaaggctcacaaaggtggctaccaccagaatccagtcacctgaggagctttccttccaaagcagagatgccctcatcccaccctagggccagcaaatcatgagctgggggaggggaagtctgggcacctctttttaacaagctcctccagtgaatctgacaatgggagtcactgaattaaagccattaggagaaaccacttagctcaagtcagagattaatctacaaatgtcgccttaacaattagcccattagaacatatgtatgaggcctgcaggcttagagaatcgtgctaggagtactagaaaaagtacagagaggaggatgaattaattctctcctgagcaggttttacacattcttctcagctcacagcagaacaaatgaccctaattaatgattctgcatgtttgatcagggtttatctgcctactgaaggcagagacccttctcagaaaatggacaattttctatatatgatcccaaaggcataggactttttaaattgaagtatataatttacatataataaaatccactatattaaaaaatacactttgggaggccaaggcaggaagattgcttgagctcaggagttcgagaccagcctgggcaacatagagagaccatatctctacaaaaaaaactttaaaaaaattatccaggcatgatagcatgtgcctataatcccagctactccagagggtgagtcaggaggatcgcttgagcctgggaggtggaagctgcagttgagctgtgatcaaaccactacactccaacgtgggtgacaaggcaagaccctgtctcacacacacaaaaaagaaaaaaatagatgtgagaactcccaaggcaaaacaatctggtgacattttgttttttgagagataatatcattccaacatctaaattataatgtttttgtcctggtgaatttattaataacaatgccaacaaacatttattgaacacctatgcacaagggccagagtgagagacagagaaatgcaaaactgaaacagttaagtctggcctggcctttgccctcagggagcatgggatctagaagtttaaattactcaagagtcccttctgaatgtaagaagcgctacacatatcaacagtcatctccaggatataaaggaaggatcagatcaggcagagaagcaacaccaccctcatttcagactcccaaagtggaacggggagagaaagtgagaaatggaaaaccaaggaaaaaggaagaagaatttttgacattccaagtccacctggctgttctaggaaaggacagacaccagtgatatggtttggctgtgtccccacccaaatcttatcttgaactgtcgctctcacaattcccacgtgttgtgggagggacctggtgggaggtaattgaatcatgggggcgggtctttcccatgctgttcctgtgatagtgaataagtctcacaagatcagatggttttataaaggggagtttccctgcacaagctctctctcttccctgccaacatgtaagatgtgacttgctcctccttgccttccgccatgattgttaggcctccccagccacgtggaactgtgagtccattaaacctctttttctttataaattacacagtattgggtatgtctttatcagcagtgtgaaaacggactaatataaccaggcacacaggatgagtgatgtggagaaggaagagcacaggacacagaagacctgggtgtgaatctccactctgcccctataagcaacatgctcttaagcacgtcacctaatctctctgggtctaagtttcccaatctgtgaaataatgagattgaaacagatgattatgagatgggaccttggtaggaactaaaaacttttggcttgaaaaggtagccctcacttatgctaactgtaaaccatgtatacataagtctgattcaacatgctgacaatatgcctgtccctaaatctgtatgcaggagacttgtttcataagatcacaagaataaactccatagacactcagattcatagtttgtgtttccagcagcacaatcaattgctcatgcagaatgtcatcccacaaaactaacacaagacatagaagggccatggatcagctttctcctgagtctgggtctcagctctgccatcactacagaaaattgagtggtggtctgacccatcgcctccctctccttgcctctgtgagctttgaaaagcccatgtttttgcaggctttagccttccagaagctcagactgagtctcagtgttttcctaagggaaaaagaaaatgatttttttctctttactgtttagcaagtatagttgatatgttcttgtcattcctaagtcatgaatggttctcaatagaagaagatataggccaggtgcggtggctcatgcctataatcccaacactttgggaggctgaggcgggtggattacttgagatcaggagctcaagaccagcctggccaatacggtgaaaccccatctctactaaaaatacagaaattagctgggtgtggtggcacacacctgtaatcccagctactcaggaggctgaggcaggagaattgcttgaacccaggaaacggaggtttcagcaagccgagataacgccactgcactgcagcctgggcaacagagcgagactctgtctcaaaaaaatatatatataatatataatcttgccaccaaaaaaggatttttgttatcatacatttaaaaatatctgtaatatttctgcagagccatttaatcatccataggtcccctaaattaccaagctagcactatgaaacatcacatttgacttatggaagcacatgcacaaaaatgctgtaaattgattcactggaaaccaagactccaaacaacggattaagtagagatgtattcaagatgaaagaaaggaagaagaaagaggggctttgtagttggtatttgggattatagcattaaaataaaatgcatgggattgccagataagagtaaaactgatttgttcacatgtaaggaaacctagtaaaaatctctatgattttacaggcattaggatctggtgcttccaaaagtgcaatactatgaagccatactctgtgtgcaatggactgaattcttaggacacacatgtaaatcggagagaatccctccttaaatcacctcaaatgtcctccataacttttggtatgaagaaaaaaaaaatccttgacagagtccacaaggccctgaaagctctggtcttttcctcctctctggctttatttcacatgcttccacatctagactccaggaatctaacttgcagttattctcattctccatttgcctcctcccaccccaaccaccacagagccttcgcacaagcactttcctcctcccagaagcctcacctgctcacatgggatgcccatccttcagaaatcagctctgctgtcacttccctgcccacaggtattctgttttgtgtagcagttagcaaagcagcaattttacatgtctttgtgcaatcattttgatcaattgctctcctctttcctttgctggatggcaagttctatgaaggccgggtgtgtgtccatttttagttatcacgaaattccaagaaagtagcaaagtgtctcaatcagtatttgttaaataaataaatatgtggagaaaaggctggagaattagtttgaagactgagtgtagtggaagcaaaagagaggtgggagaaacatggattaccctcactgagtgagaccctgaagtttataacccggaataaaggtgagatgcagttccaggtaatggcagcatccaggggatccctggtgaaagtggagcaggaagaagagcaccgcggtggtagaggtcgagggtctgagacacacacagggatagcaaggacagtcctgcacacagactcaaaggggatggggggagctgaggttgagaatagaagaggacagggccatccctgaatagggggaggggcctggacttagatgggtgacagcatcaggaaggacagagagaggaaggatttggtcggatggcaggagcctggagaaaacaggtttctacaagaacagaagggcaatgaagggccagagtgtccagcactcctgggttacaaagatggcccggcatggtggctcatgtctgtaatcccagtactttgggaggtggaggcaggtgggtcacctgaggtcaggagttcaagaccagcctgggcaacatggtgaaaacccatctctactaaaagtacaaaaattagttgggcgtggtgctgtgcacctctattcccagctactggggaggctgaggcatgaaaattgcttgaaccccagtggtggaggttgcagtgagctgagatcataccactgtactccagcctgggcaacagagcgagactccatctcaaaaaacaaacaaacaaacaaaaaacaaacaaaaacagaaacagcaacctccagagagaggagtgagggaaacaactatgtctctaggaaaaacagattcaactgaggtggcagatatagggagcattacgtgaagaagcagagaattcagatttgaatcaggactaggaatctgtgaaaacagatgtcataagaaagtgagatggagaggcataaaataatggaaatgccaacgttccaataataagtgaatatatttgtgtgtatttgtatgcacacaaacacgctgcaaggggcacagagacaaactgtgattcctctaatcagaaagaccgggtctctgtcagtatttattaaccacctgggggtctctatcagtatttattaaccacctgcatgccccccagcagtttgtctctgtccattttcaaatcaggtcacttcaaagtgactataaatacatacgaaaccctgggaaacaacagggttccctcttactataagtttactataaatcatgcatccatcagtatatagacaaagttaactgcaatcatggacttttttttgagagggcagaagaaaacttgactcatgcagatagacacagtgtctgaattctcattttttaatgctccccaaagaagaatctgggacatgattactacaagccaattgcccaatctcttcccttctgaggcctgtgacataactatagggccagagttatgtgaacttctgcaggttcgtgttccccaaacatcgcaggagtgttgtcctacatcctggattttgttgatgatgttcatctcattttgcccaaattaaaaatacagaaaagttcaatatattcctcctagggcttaatttattataactgaaatgagggaaagcagttgtaacaggaagtcagaaaactttccctaaaacctgtgtccttcctgcaagccgaggtttaatgacactgaaatcttacatcattgcatcataaaacttaaaaggttgctttttgcataattttaccaatgacattaaaaccgatgcactggcaagcatgataaaatcttccatttgaggtctaaagttggaagacctttcctgtccaagtattgaaaaacctaggggaaaaagttccatctgctggtggagcgctcaagtttgcagctaatgagctttttaagaaattgtctgacttaagtgcatgtgggtttggccaactggatttttaatttaattaggtttatgagatgagaaatcttctgtagcgtagtcaggtcagaagttgccactcactgtcaccaaggactaaatttgtggctatctttgccctacttctcaaaccctgccagttgttaaattacattaaaggcaaaactggaatttaaagctgggactcaaacaaatacttatatgcccatgtttgttgcagccaaaaggtagaagcaacccaaagtgtccatggacagatgaatggataaacaagatgagatctctccatacaatggaatactattcagtgttaataaagaaggaaattctggtccatactacgacgtgaatgacccttgaagacattatgctaagtgaaataagctatacataaaaggacaaatattgtgtgaatctacctaaaggaggtaactagagtagtcacattcattgagacaggaagtagaatgatggttccttggaagtgggagagagggagaagtggggaattattgtttaatgggtacagagtttctgttttgtaagatgaaaacagttctggatatggatggtgatatggtttggatgtcttccctcctccaaatatcctgttgaaacatgacccccagtgttggaggtgaggcctgatgggaggcgttttggtcatgggggtggatccctcatgaatggcttggtgtccttccagtggtaatgagttagtgagagatatgattgtttaaaagagtctgggacctctgcacttctttcttgtccccttgctcctgctccctctcttgccatgtgatacaccagctctccctttgccttccgccatgattgtaagcttcctgaagtccttaccagaagccaagcagaagtgggtgccatgcttgtacagcctgcagaaccatgaaccaagataaatctcttttctttataaattacccatcttcaggtattcctttatggcaatgcaaataactagtacagatagtgatgatgattgcacaatgtgaatgtactaaaagccactgaattgtacccttacaaatggctgaaatggtaaatcttatgcatattttactgcaatttacaaaatggaaggaaaattctgagaacccacaagtagaattcagaagcatatgtatatttaaaaactcaaacatcataaccctcccacaggaatactgacatctctcaattcaatggcagtgggtatctccaagaaacttgtattacatgcaagtgactcttccctctctagagcattgatcttaccccctaggatgctggaatttctcctttcatttccagaatctatccccatgtagccacagagatgttatgtgtgtcccgcctttcccttgcactgcactctagtctacaaccaatgcccaaagttggctatgatttttttagagaccttattttgtctttcggtaactgtagctaaagtccaagatataattaggaactttaaaagagtgttcccttcatcctataaccactttacaaacactcaacaatttcctctggaagataatgaaacacacagagggcatctggtccctaagactaaacctcaaggtcaagcttggttgtagctcctcagtggcttaatggaacattgaaagcacccctagaaataacataaaattttcatcttctacagcaaggattttggcaccaaggtcttactttgtaaaaggcttatgtaaaaggcttatcagtgcatcccagaaagcaatgccatctaagccctatagtgtcaagggagttggccaaaattgctaaatgaccattcagctgacgatatgacaccaacatcggctgtgcaggtgcatgctcacattcctggcaccaaacatgtcacactccattttctcctctgcagaatcgaatctgaccataacaatggactgggcttgctaagaatgatactagcatgcctctttgttaagactttcagtgggttgaaatccaggtctccaaagagaaagccctaacctgtctacttctgacatctctccttcctgccctcacctcagaaataaatggtatttttgtatttacaattgaattcttacagacaaactacccttcccgaatgaagtagaaagtttcacaagatagcatccctcatgctcaataaattcccactcctacagcctggaaagttggaaggcagagtcagcagcataaacctctgcatgtgtattcgcgcaagtttcgaaagcctggcccacagcccctgattccaccttgcttcctacaatggtctcaccattctccctctcacccagtgaggactgggtgataataatgcctctgtgccccctctagcacaggggacctagagctctggctcactggagataaacagtcagaaaaccacatcctctacatgtgtggggcatttgtttgagggtgggtggatgagaatgtggtcaggtaacccaagctttccttcctccttcagcctcacacttttgcaaacaaaagagaagaaatggagtctgtctgtagaatgtcacttgttatcttctcaaggtcatttttaaaaaggaagatcatgtgtatgatgttcgagtatgcttcatagttcagcagaccaggcacaccaggtacacagtgaaagaattggcaagacaagggccagaaaatgcgtggagatctttcattgcacagttttaagagctttgacatagttatcaggaagaaatcagaattgaggtgggctcccttaagcttactgcatggtttttccatgtgtcaaatttatatgtgaggagaaccttcatcctttcagggtttacggtctcttgctgtcataacccgcctgcatatttcagcacagccccagcctgatcaccaatttccatccctcatccactccatcagaagatctttatgtgctagaataaatttctcttaacctcccacaccagcctacaagtcattcattcattcattcagtgcacaaagttgctgagtatccactacaggttcagagttgacctggcaggggacacaaaactgaagaatgccctttttttctggaactggaactggaattttcattctcgggcaaagcaggatgccagaagccagatgatgttcatagcatcaaaagactcttttttttttttcctgagacagggtttcactctattgcccaggctagagtgcagtggcacaatctcatctcactgcaacttctgcctcccaggttcaagtgattctcctgtctcagcctcccaagtacctgggattacaggtgtgcaccaccacgcccagctaagttttgtattttaagtagagacggggtttcaccatgttggccaagctggtctcaaactcctgacctcaaatgatccaaccgccttggtctcccaaagtgctgggattacaggcgtgagccactgcaccctgccagaatgtgcatttctaataagtttcaggtgatgctgatgctgctggttcagagaccacattttgagaattactgcttttaaccttatttataaaagataaaaagtttattctttcaagatattctttttctttgaacatgggtataaaaacattttaaactgtttaggtatgtgccatttggacaaaatctctttaatatatctataaaaatatactttgaaggcttccaaaggggagaaaaccggctggagctctttatcttgaattattgttcaaaatcattttcagagtctagttcattgggctggacaatgccagcaaggtgtttggtttttaattaaagttgaaatatcatctccattgaaaggtacctcatgaatttaaccatgatgccatggctgctaaaaacaaaacaaaacaaaacaaaacaaaaatacataggcttaggctgggtgctgtggctcatgcctataatcccagcactttgggaggccgagatgggcagttcacttgagctcaggagttcaagaccagcctgggcaacatggtgaaatcccatttctataaaaaatacaaaaattagccaggtgcagtggtgggcacctgtaatccctgctattcaggaggctgaggcaagagaatcccttgagcctgggaggcggaggttgcagtgagctgagatagcaccactgcactccaacctgggcaatgagagtgaaaacctgccaaaaaaaaaaaaaatacctcgtaggcttagatttctgaaaacatgcttccacccagaaccataaaacttgtaaaggtgtggctgaggagactttgggttccaaagaaagcattcagaaagcaccacaaatgaaaaataggagttcatcaatatactgtttcctttatcattagaaagaaacagtgctaaaaaagaagaatgtccacatgacttccaaaaacaaaggaacccagggtcatgactctgtctgtttttcccagctatatctaagacttagaggggagagaacagctccctttgtccaggttccacccactgcaagaactttttggcaataatatgacttctcttgtgtgctctgtgccagccaaacttcgtaagaatgctggccagcttggcgcaccctctccagcattacctatgtttgttatttgaagttgccatgctagattttactttaaatgacatttcaagtacacagggtagttgaataggtttaagtcttgttgtttcttttcttttcttctattgaataatcaatccattcaggcacagaaagatcaactcttaggcttccctaattaccctgaatctgctacttcacccaagggacctcttgaaagaccccaaggatgctttaaacaaagcacttcttactctttattgtagtcatgagttttcttctgagtctcttgtctgtgatctcctccttgaggatggaaagggtatcaatcatggctgtggccccaccattcactcattcatttattcaatcaatgtatatttattaaatgactgctgtataccaagctttgtgctaagcctgaatatgcagcagaggaccaaagagccacagcccttgccctcatgaaccttacagtctgaagtagggacagacactcaacaaatgaccccactagtgagtaaaatttgcacatgaattaggaggactctccagagaaggggcaatgagctttgcaggctgtggagtctaggggtgttccatggaaggaggatgagaaggagtgaagaagatgaagactaacattgctctcacagaacccagtgcatctaaagctccttaatgcttcccccatggatgcttgttgagtgactggatggacctaggcagagttttgcactcaatgtgacagactggggaggagctctgtgtggagcaagcgatgaagtcccactgaattcaattgagggaggacccactgtcttcaaaaaggaagaggcatctccattctaaaggtggagcaactgaggcccagagagcttaaatgccctgtataagaggcagagcttagtctcaaatccaggtcggactccctgcctttgttcttttaatccatgactccaaagctccttcctgaattggtgggtataaatcctcctgtctctcagaaacttcttctccactttcccttgtgaaactctgtttcatctcatcagctttccagagttatttggtgaaagagcatccaaggcaggaagatttttcttggatcgctgtgatggctgcaccctccaaaaatgggttcacaaagggtaagcatcggccccactcattttcccaaaccatagcaaccctctctttctctccaagaaaattttaagttgcctgcatcactgtacatattattagcatattttccaatctcatatcagaaaagtcttctaatgagtcccaatctaatgtgacaatcatccaacaatagaatggctgctgcatgtggcactgagctttcagtccctggggacatttaagttgacacaggagatcacctgccaagaataccataaaaggaattccctgttatatcagaatgctgactgatttctgatggcattttaataagccaagaatagacgcttcttgacagtagaccctgccaagtgaatatgcctaaggagactctacttcccagtttgcttgatgtcctggaataattattaagagcacctcctttccactctcacaagtgccctgagtagatgccaaagaatatggtcatccaatttaagttgcacttgggtccttggagagaggcctaatacatcctgacacactggctgccaaacatccaggagaagatggggaagcacagttgagaatctgcagtgctcctgtagccactctaggagagtttctagttctctgtttagtaacctgatataccagcaggcgaacgacaatgtctaaaacctccatagttctgtgcctacacacaggcacacacacactaaaacacacacacacagacactcatgctgttcgcagagtataggagattctccgagagaagccagtagcatttccatgctgctagtggtctgctgatgagtaagtgttgtttttttaaggccttgtctggcattgaacatgattaataaattgctggagatgatggggactgctctactgtgattgagttactggaggcttacaaggatgaaaacagggatctctagatttcagatcaaaagcagtccataaaacacagcccctcaggtcatgggaagtggcatccgcaggcttctcaagatcgcttcccggtgaaaagagtaaaccagcctctgatcccatactgaactctaactcacatggggttcgaatgtgtcatatgctctctgtacctcaagtaataaagcagggagtagtgggagcccatcgcttatggctacttttctcaggaaaacttaagaccatgcaggatgggctggctcaattttgacagagagggtgtctctgcactgctaccttagtgcgcacagtgatttaatgaatacacgcctcagtagtgactgaacaaaagcagtctccaggagacgctgcaccaatgcaaagaaacacaatccaagcatcttgtggcagaagtcccagcagtccccagcctgggaccaaaggaggcctggccaagccttgatataagctgctttcccactgcacaagggcagagtccccaagtgaagaactgccccagttctggctcaaggagttggtggtcactccttgtcttcatttcaggggcttctagaagaccccctttccccgaaaagtattctctatctaagagcctgaaatttcaccattagagattacttcctttcaattttaccttaactctctttcttggacttcttaaaaagcacaaggaataaggagcaaatccatactgagttgttaatgatttcacagggtgatgttgaaatggcagcctactgaatatccacttgggctgtaggttacaagtgcatttccaaatattctgattccaaaggtctgatgaacagcttagaactctgcattttcaacaggcaccctgcacccccatctgctgtaattctgaagcactttgagaaagttcatttcaatgcaccatatcctctcagggaaagataacttcattcagagtttttaaaacctggattgtcaggttacaccccagagcaattacatcagcatctctgtggggaagaccaggtatcagtatttttctgatgtattagaaaaagaaagctccccaagtaattccagtgtgcagtcagggccgtggccacctgaacagccaatgggtgggatcttaatgctaacacagcagagcaaatggaacatgtgactatctccagggatctgggctgcctgggactcaggtctctgcactggcgaagtgggcagctacctggtcttcaatgtccccacttgagtgaccctggaggagtcttcagttgactcagttatggaggagccccatctcccctatacaaacccacacctctccttgaaaccacggtgatagggaggctgccccaagctgtacctctgaggagatacaggtaagtagaggctgggacagagccagacccagacaatgattggccatttgctgccacttggatttcagtagcctgagttgctttggcaggctgttccctggctctgtggggtccctcaagcaagcacagccctctcacctcctgcttttgggcacctctgggaccaggtgcaggatttggccctcaagcattgtgctgggtggatagctgcttcctgccagtggcaatgcaggcctcattccttgtcaaggaacaggcaagggcagaaggcagaagtcacatatggttgagagactctctaactccaactaaatccacaccatttttgagcaaaatgggggttgtgttcatgtatgagttcccaccaatctctatccatgtggcaattccatctgcaaaacccaagaaatagtggtgcatgttggtcccggggaactgggaactggagtgagctcagcaagagcccagaagtccgggagaactggtgcttaggatgatggctcaatgtccacccaaaacacagccgttatttcctctttgttcaagctctctttctttcctttctttcctttctttcttttcttttcttttctctctctctctctttcttttttttttttccagggtcttgctctgttgcccaggctagagtgcggtagtgcaatgtcagctcactgcaacctctgcctcctgggttccagcggttctcatgccacagccactcaagtagctgggactacaggtgcacaccaccacacctagctaattttttttttttttcagtagagttggggtttcactaagtgattggcctgcctcggcctcccaaagtgctgggattacaggcgttgaggcaccgtgcctggcccaagcgctctttttagaggcttgagggtaaacttcatcccagctccctctaatagaaatattcaaagattcaagccacatttgtaattttgaatgtcccagttagccacatttcaaaaaaaagaaacatataatattagtgtgtaaagtgtttcatatttaacccaatatatccagaatatttttacttcaacatgtcattaatattaaaaattcctaatgagatactagaaatacttcatgcacctgacacccccactgaaatataacagtgtttcatgtgttgcaacaattgttgcatcttgtgaaaattagtcctaccaaaacaacaaagtattgtttaacagacaaacattttatattccttcagtttttaggtttatatttttgttaattaaagttaaacacaaattaaaaactcagttcctcagttgcactggctacactgaagtgcccaatgggcacatgttgcaagtgggtaccatactgggcagactgagaatgtttccatcagggtggaaagtccttagatcccttaaataattagaaaaggtcccaactctcattctgctggtccaggctagagacacttagaagtgtcctgagtgacatgggtgctctctcgtctcacaaaaaagaagcacaagagttaagggctagaacagcataactagaacacctcccagagatgtggcctagagcaggtaactctcaaggctcagttcctgcctctgacagaggagccgaagatgagcatctaccacaaagaggtgtaaggattgagtaagttaatatgtttgtaaaacactcaaaacagtgcctggcacatagcaagctctctagaagtaagtgctaaataaatccccagttcaatggctgccagttggttgccagacactctgacatctttcatcccagaatggccttactggaagatgcaaaaaaaatctctcattgtgaacagctcccagccttctggctgccaaaattatacattgattcacctgagccttacctgatgcaaaacaccacaaccccacaccctgggggaaaaaaaaagctcagatactctgaaatgttctagaatgtctgtccctttcctatcctccaaaccatatcttcctgaccctccaaggtgaggacagaatgccatcccttctccaggttatttctccttattcaggtctgagtccaggccagctcctcctacaaggcctttcctgactatcctttctaaagcacgactgagttgtgagcaagcaagtacatgcagttaggtgcacacagcactggcctgtcccctcacactgtttcatttccttcattggcttatcattccctgaaatcacattgttgacttacttcttacttgtctattgcttgcctaacctcaaaagaaaataaattctgtaaggacacagacctggtctgttcagtccttgctgtatctctagcacccaggtgtgagtacctagaacacagtacatgctttatatacaattgttgaatgaatgaatgaataccctccttaaagtataggttcctatttccccttgcttgatattccaaagcactttccatctttcatattttgaaggcagtcaattccataatacttgatacatacagttaactatttttgtgtatatgtcttatctccccaactagacaataagcccctttgatggtatgtcttgaatgtacatccctcctgaggtcctcttgcatcctcaatgaatacttgttgatgaatgactgggaagaataaagcacaaatcttaaattaattttcttggtcacacatactagactatttctacaaataataatttttaaaatgaagtaaatatatatatatatacacatgcatctatatatgtgtattatgtttctcatcctaattaaatgaagctatttttgcaactgttttccagtccaagtgtaaaactgtaaagaataatgctaaatgttagatcattaagttggttttctttaattatatggcagtgtttcaaaaaggctttgagtcacctttaagattccttgccaggggtacagcacactacatttaaaatggcacttatcttagtaaacacatttctattgcaaatgatttgttccaataagcaatcccttggcaaagagctgctatttcttctagaccccctaccaaaacatggacctattataagcgccagagaagagaaagcttaaaaagcttcctttatcagaagttaccaagatacattccctaaagcagaagcatctattcatctacccttttctctgatttcaaaacctatagcacttactttttgtaaatatcttctataaggtagctgtaaataagtcctcaaaacctattgtgaagtaagctatagatgtaaatatacattcatcttttttctctctctcattttctttcctcctgcctctctcttattctccctttgtttctgtttttctaaaacaaaaatcagtaggttggtcacaggcaaatacaagttcaatttctaccagaaagctgagttcttgagtgattaagcatacaaaccaatcatttgaagggaaaaaaaatccagtaaaggctaaattattttctgaagtacttattacattacatgaagagcttattatgataagctattatacttgcaagatgaattgaattcacattcaggcaactcatctattcctagagaaacacagataaaaaattttatagcaacctgaaaaggtttgtggaatggatataaaagagatcaatactataagattttaatgtcaaattgaaacaatagaaaacatggtccaaaacaaggtctcaatttccaataaaaaggaaaagaagagataactggtgagcagaggagaggacagtccttcaggcaggagtggctggggaaggacctggtggaagtgtaattaagctgtaaaggaatcatggatagaatttggagggtggaaagcagtccacctgtaagttcatttattccacgtgtatttgttgatttcttactatatgctgggcaccattcccagcacaggggctatcacagagaacacatgacaaagaccccttattcagatgatattctagtggggaaggcaccacttctagaaattagttatgaaaaagcaggcacccttttatgtttacgtgtacatacatggaaaggaggcattcatgtttttgttttctactgcccttctcttgagcctggaaggttttcctttgtactgatggctagcattcctcttagctttgtggagatttgccttgcaaacaaagagttccctctcttccctcttgccactgtttaccatggggatgcagttaaggatcatgacaagccataaaagatttctcctaactctttcaagtatgactatcctgattatagcctccagatatggccagccagaatcacacactatttataggcttaacccacaggcagaattagtcatgtatcacacatgactaaaatgcaagactctcccagacctagggtcctaaacaaatcccctctccttccctaaaccttccaaagaagggcagtgaggatgcccccacaatgttcttcctacagacatgtttatttaagatctcctccccatcccctaatcaaggaaactacacaactgagctaatcatttaaatgatgctactgagaaacgaagccattttccttgttaaaaatgtgcttgccaccctatccatttatctatttccttggcagtgctcactgttaatttattgcccaataaagcacagacactagcagagctgctgaaccatgcctagtggaagccccactatttcatcccagcaaaggcaactgacaagcccaaagcacaaacacaaacacattggatgccacaaagccgggctggctaaccccgactccatttgtcatcccagagacacagaagggagggcggtttacagccttctggagaatgtaggtgattaataactatcgattgtcagaggaaatggagtaagtttggtcggttagccaactgccatgggttttctttctattggatggtaaacctcactgccgcagaagccatctcatggtgagttttgtggggagagaaactgagaagggaagtgatgaagaccgagatggggcagccttggctggccatggtgtccaccattcgggcagattgcctcctgttgcctcctgcagctaacacacagccatcactcataaagtcccaggcagatgtgtgcttttagtgcaaaaccttggcaatcattatcttgagtgtggaggggcttttcttttcagagtctccttcatgggcaactggatcaaccacacagaaggcagatccttcttatttggacagcttagacctcagagagcctataccaactgaatatttgtgaggtaggatctgaaagcacaaccctgagcttcaggatactctttctgatgtcttgactagctccagtttgcctggaggtttaaaggaaaatgtacccagaaaacctgggctcttactccagtatctgtctaatacaggaggaggaagccttctcaaagccaaaagaacagaacaccaagaggggttccaaagattgggttcaaaaaagtcattgaatgttactttgagaaggaagcaaggtcacctagtcgtaagcctgtattttagaggagaaaactgggacccagagaggaattgacttgtccaacgccctattgtgtgttatggacagaagcaaaattaggaggatgggtgaaaaagaaggaagttccaaaagcccacagggtctgccttccattgccatagtcccaattgttgctcccctagtgagggcacagctggcctaaccactcacaggcaaaagacataagactacaacagaccccacaaaacacatgcacatcatccactcctgcaggaagttgtgagcaggttgccctgctccaccatcactgctcagcaggaggtagagaggtagatgagaggagcacaggacctgagaaccaggagaaaaggatggcaagggaggcccagccccagccaaggcccagcccagttatgtaatccaccctgggaggttatgcccgctgctttccatccacggattttgcaggatgggtcttcactaggaagatgggggaaatgtcccagagggaatcctcaccagccctgtcccatgtcaagttctttatgcctctgaaccttcctcaaacggtgtccccccttccttgcccttgccccacctctccacattcacagggcatcttaattccctaagctgagtcaacatgagtaccacagtcctctccgcttaaccaggctgctgcatctcagagtgagcctcacagacacgcacagaatcagcacctgctgggcattttcatgtaatttgatgatcacctctgtaataagactcctcaggagctgagaccatccttcgtctaccttctagcattgtgtctccattgggccattgaggccatctgctctggaagttcctgcaggggcctgctaacaggtagatgcctaggcctaatccctgacttgcaaactcagaatcttgagccagttcaggaataactgcctagagtgcctcccacagcaaagggcatactgcagacatcaggaaacactcattgatcacagagaggggcttggcgtcaggggacctaattttaaccttgctgtgtggccctgcggaagtcacttaaccctctggtattcaacttcttcacctctaaaataaatgtcagacatttgtggatcatggatgtgaagttaccaacacagatccaggctcagcaggtactcaattcgagatgtctgtattatgcgtgaggtttgttcatacacagattgacccagtaactaccctgaaccagatccccagggagtgggtttctaaaggctggggactgggcctggcttgagaatatactaatcacacaatatatttataatagccaaacacactacataacctatcatattataaatgaataatactataaaatattaatagcaaacaaaatatggtacatattttgtgccaggcactattctaaatattttacttatatttccccatttaatccccacaaaaaatttagaagatagttctattattattatccccactttatagctgaggaaactgaggcccagggctgttaggtaattctcccaatgtcctgtagccagtaaatgacacacagcggggattcttcaaactcccacaccttcctgagatgtcagctggctgtgtggttcatgccttctcttcattgtctctgccctgagatgtgctcagcaagtggtcgttgccttaagagagctttgccttcccagcatggttgggggaagctctccctccttcaagggaggagaagaaggggtgaggagccactaacagggctcacctgcaaagttttcaggaccatacctccaggccaaactctaatgagaaggagcattcctgggcctcagctccctggggttcagacttggccccttaccataaagaggtcaactaatgcaaaatgcagaggctgcaccatgatagcttttccacgatgggtctgggccaggattgagggcactgtccagcaagctgatgcatttttaaaacttccgaatcattgatactacctccccagggaaaggaagacctcagcagtttctccaacacccagtccacatgccaacctgccagagaagctgggacggaccacagcaaaagcaccagcacccaagctctgccacagacaactgactttcagggacatgaatgacctcctcactgaaaatgaccttccccagggggcttattctctgaacttctggaatcaccaatcacttctccatgtaactgactctacatcaaagtcgatgcaacagatcacatttctcaccactcccactgccccaacctggatgcaaagtgtcatggtctttcaccagattattacaataacctcctaagtggtctccctgcttctacacttgaccccaagtaccacaattggagaaggatgatctccaaagctgcctgggaagtctgcagttacgcctttggacatggactgttgggacttttcagtttctaagagttcaaagaaaaaagaatgctagagatgttttctttccatccaaacaactaaaggcttgtatctttccattaatcaataccaagagctgttcatgcagctcaaatccaaaaatgagcatgctgagtttctcaagtctgtcctctgatgatatgtatataatcagcatgctctgttgtagacctttgtgacaatctgtgtcacttagtacaagtttacccaatgtcatttgcatttaagcaaatggaaaagaattttctcagaccctactatgactctggccacctgataggtgctatagaggacaaaacagaaatataaaatatgattctctcctttaaggaatgtattttttctgatggagagacaaaataaatgcccaacagatagacaaacaaccatatcagaccatttaaccatttccatatggttaaatggaaatatcagtaggaaagatattaaacaccttgggaattcagaagcagatgatcagtttggctagaatggctgggaagataatctatcaaaagtaagaaaagtgataaatgtgtgaagtgtaaatgagttgtagtattgcatcccaacaggcaacaaatatttcgtgcactggattgaactgctgctaatactactttcctctctcctgcatttggaaaaaaacaaggtggtctccgaaatccagcctcaacccaggactatggaaatttgtaatggcagtgaagacaaaaaatattttctctgccatatgcggtcaccaaaagcaaagcaaaaattaaagcaaagtatataggatttggtatggtaaaagtgaagaatcacatgacgattcgttaaagaatataacctccacccaaggggacagttgagggatagcaaagtcattaaagcgtcacagctaaaaggaaaaataagtctttcagctactattatccatccctctgctattcagtttcatgaagtgaagctactggagtagacactgtattacatcacaaatttgttacagacattcctgtaaaagtggctttttcctcatagactgaaaatacacctgaagatcccctcatgatgaataggaatagtccattttagatgagtagattttggaagtgtttccacacttttttttgtttttaggtttttggggggtgtgttgttgttggaagctccagcattttcctcttcaccacctgcagcactgggacagcaaagctgaagaatctcattaagcttcgacaagaccaattttttatttttagccagtcttttaagacaatgtgaactctactacatttagaataattattccatcaactatttacttaaacattttagaggaaaggaaagaaactgggagatgtttaaggctttttataacagattgtttcaagggtaaatagaaaaatccaaatgcagctgctgaaaacacgtaagcccatggcagggtgcccacttgctgcagcggaagtgaatggtgagaagagatgaaagatgtggaagacaaatgtacccagggcatccaatcccagcaagcggacaaagggcagattcataacactactttgtggttaactggtaactttcatcagggaacctcaacacactttacaaataacacttattttcctgtctcacagaagcagggagataaatgccaagcccaaacgtcacacagcaagggtgtgatgattttaagaataaaatccagaccttatttcccagttggtggcctaccaggtgtcttgatatggtttggctatatccccacccagatctcatcttgaattgcagctcccacaattcccacatgtcatgggaggaacccaatgggaggtaattaaatcatggggcaggtctttcccatgctgttctcatgataaggaataagtctcatgagatctgatggttttataaggaggggtttccctgcacaagttctttcttgcctgctgccatataagacttgccttttgctttctgtcatgattgtgaggcctccccagccacatggaactgtgagtctgttaaacctctttttctttataaatttcccagtctcagttatatctttatcagcagcaagaaaacagactaacacatgcctcccttcgaacccacagtacatccccaccatttgctctttccataaaccagtttcctttgaaaacttccagatccttcctcctctaatagagaacaccaacataccaaagactacttcagacatgaaagaaatggtgtgcttatcttgaaatctcaagtggaatggtaaaaacttacctaggttcatcaatgcgctagaaacaccacaaattaccaatgcaggggaaaatgaagtatgctgctacaagggatgcattgacagactccagagaacgccactcttggtaagctgattctgaccatatagaagttattttataattctgtaaattgtacataagtgacagcaatgcaaataattcctgtccatggacatgaaaattctgtcctgtccaagagaagttccattgacttctctcctgcctttgtggaaaaaaacagttttgcctctgtttccacattcatttaaatattactgacctgtaagtgtctgttcttttcttttttgtttatgtttgtgtctttgtttcttcaagacagggtcttgctttgttgccctttgttgcccagactggagtgcagtggcacaatcatggctcactgcagcctctacctcctaggctcaagggctcctcccacctcagcctcctgagtagctgggactacagacaggcatcaccatgcctggcttttttttttttttttcaggtataggcagagtcttactatgttgcccaggctggtctcgaattcctgggctcaagtgatcctttcaccttggcatcccaaagtgctgggattacaggtgtgagccaccatgtcctgcctgtcctcaactggttataacatctgcctggtcccctcattgaataggagtagaataaaatctttaacacatattcattttgatatctgaaagtcatgattttcttcttttgtgaaaattaatttttaataccaattcaatctcagaaatgctcaacctcaaagttagaaacacagatgggaacagcaagagatgttagaactcacaagaggactgatggagaaaataggggtgtagatctccgaacacaaattggaaaagattttcttatgagaacaaatccataaatcagaaaatatctgtgattttatcctctatcttcctaccacttcaatcttgttaactcaaatataagacatgttaactggatccaggacctgagccctggcaagtgccacagacaacagcatgctatccaaaggactgcccttaggaagcccttaggaagccttgaatgcattagaaaaaaagtactctcccctctggctgacacagcaccattctggagcctctggcttagcaaaaggggtacaggttgcatttgagtgctttcttgtaccttcttcagctgggcacctttgtgcagtactcaacctatacaactgtacatggtggccatgaatggaaggaccactcatgacccaggacccaaaaccataacagggatatatagctagagaacagctgctgctaagcagggcatgagagaaactgagagggctgtgtccgggctgactttatctagaccactgagatccaatacgattgaggaaaatcactaactctatggcaccctgctccagccatgcctgggaaccggtgactgccttatgatgggatgcccttttcagggagtcaagaagtgcctgactggtaataaaaaggaatgaactactgatacctgctacaacatggaggaaccttacaatcattatgctgcatacaaaaaagccagacataaaggattacatactgtatgagttaatttgtattaaatgctcagaatagaaaaatctatagaaacctaaaaataggttcacacaaagtagattagtggtttcctacagctgcggtggttggggagcggactgaagggatttccccagacactccaatccatgtgtctgggtgttacgataaccatgataataaaagccagggagacctcagtttgggttaacagggaggttaacctcattttcatgctttgtttttcaacccttattactgactggttctgccacgatccttaaaacatgctcttagcaaattttatttttagtaactatcacttagtctttctccccagctttttcccactttcctcccatcccttagatcccatctctcacatctgtatgttttacccaacaggatggaaagagaacaatgtgtgggggcagatttggtacctgtcatggccttgacctctggcatcaggcttcctctccctaaacaccccagccaggctgcactttcctccatgactcaggtgaaccttcctctgtgccaccacgtggactttgcaaattctgtttctcctatctgcaacattctctcccattctcctcccaccagtcttctttcatcatggatgaaggatgactcttattcttcctcctaatctcaagccaagcattcttctcggaagcctttgttgatctttaatcccttggctctcatagcagaatgtgtgcagggcaggtatattagaatttctgtaggttaaactcataaactgtgggactttgttgactaggtgacatcaagggaaacagaggcaggcttcttctgtggaataattgtgcatccttcctgcccttctaggggtcctgactatctccccagcccccagcctcccaggctccaatctgcaacaacaaagagatagaagctctgataagaaacacaggtggctgggcgggtggtgtgctctgtagtcccagctactcacaaggatccccttgagcccaggagttcaaattcagccggggcaacatagcaagaccccatctctaaaacaaacaatcaaaacagaatttctttgctaattacttttgacataaaaaaacaaaagaaagaaacacaagtgattgtagcaccaggacccctgaagctagctgaatatgttcctgcctctggcagagtaaatgttctctacttttgagtcagaccagtgaaggccaaccttcgtcttaggaagaagttgtggtgccaacataagctttggagccaaacagacttagttcaactaccagcctttacctagtttttggtgctcccattgactagtctgcggcaacagatgagttaaaggagatgttgggtgtgtatcctaacacactgcacaggctgtgttgcagaatagtcagtaaatgtccattttctttcttcacatacaccttcttctttctgcaccaataatttaagtaagaactttctattttctcctctaccaatctcagaactgtctagatagaagttaaaaccacctcactctggctcgaggaggagggagaaggaggcagggtttcatttcaagatcagtcagcccattgcagctggctgtcctgcagcttcaggagaaacaccagtggtcccacagctaaccaagatggtgcctgtcaggcacaacagcttgatagggacagccgcattccctgtcagattcttgataaagtacagcacatgccaggaattctgtgggcccttcaggcacttgtgctgttgacacccctatggctcaaaatcagaagctgtctctgaatttgatgaggtggtagagttggatcctttggcattgagggaagaatggcagaacgtgggtgtttacaaacacttctgtccacttatgtatactgcagatacttaatggagtgctcatcctgtgctgggatagaactgagacaaaaaacagatagtagctgctttcagggaacttaacaatgtcagttaatgggggagacaggtatccattcataatcatccccaatgaatgtgaacccaaaatgaaataagggcatggaagaacataacacaattctagaagagctgctcacaaaagatcaaggtgaaaagaagtttctcaagaaagtcgcactggagctggcatctgaagaatgagtaggtgctatttgggtgaaaggcgtgtgctgtgggaaagggatgggaagaagaggagaaagagagaacagcatgtgcaaacagagggaacagcacatgcaaagcccagtggcaagaaagactatggcgtggtgaaaaattgggctaaagacaatatgaccagggctggacactgagggtgagagtgaaatgcagcattggggaagagaaagtcaattcctaattgttcaggaaaggtgactgggtgataggcatgaccagaagaagagaggtttcctatgaaactctgtactggaaatagagctgccacaataggcaacaagaactaaggtacctagaacaaaatgctctgtcattttgttccctgggagagtagagtaaaattcaattgaacagaggttgagacagcctattgataatttaaagaaaaaaaatttaatgggctaggtcatcatacaggcatattaaaatgtaaaacagcagaaccaaatcaaatttctctttgacaggcttgccctggttttataatccctctttcaggggagactctgttgttgttattattattattattattgctcaagatggtgtctctctatgttgcccaggctggagtgcagtggcacgatctcgactcactgcaacctccacctcccaggttcaagcgattctcttgcctcaacctcccaagtagccgggattacaggcacatggcatcacacccagctaatttttgtatttttagtagagatggggtttcaccacattggccaggctggtcgtgaactcctgacctcaggtgatcctcccaccttggcctcccaaagtgctaggattacaggtgtgaaccaccgcgcccaacgagactctgttaagctgaaaatattgagctaaatgccagtgtcattcttctgtaaatatatgtaattgccatttaaagaactctcaaattaaggttataacagctagtgataaacattccttcatttctcacaatattataatagagaagaggaccagcattaacaaactggcttttcctgttctcccgaaacagtcttaagtgatctcatttatcatgaatttctgtaagcattaacagtttgtaaaatgagttaattatgttctttggaggtttaataaaatctaccaagttaagtaatatcccgatgctcttgaaatttacccagaaaactttaaagaaagaaataaatgcattcgactgagcagaacatcatgtatatttttagaaagcatacattatctcacaatacttatgctaaatatgtaagaaaatttctgatagactctaaatcaagtctagttgtaaaaggatctctcctctaaagttttttttttaatcttcgtatcaatgtataaatattggcatctatgcaagccaaatatattccaaatccaaaagctttggcaatccaaactttgagagaaagaataataaaatctaacctttaatgagaaaaagtaggaatttcaagaacatgcatctattttctacaggcagtggtatgagagaaatagaacagacactgaaacaggtgaaaattaagatgttacatagggatggcatatgggactcattaagtttaggatggtgttttgcccttctttaaaatgtgtttttcttttcccccaccataaactcaatttgccccaggtagtaaactgaaatgactggaattttctctgattagatttctctggggctgttactgggtgttaccacatggcataggggtgaggtgccaggctctggagtcaaattgcctgtgctcaaatgctgcctctgccccttactggccatgtatttttggaaaagccagttactatctctaagttccagcttcctcatctttaaaggaagaggtttgttattatgcatacctcatgggttgttcagatgattagatgagatgtgtgaaaagtacttacttagcacagtgcctctgtaaaggacagcgatcagtattcccctggtggaaacagtggccatgtttacaagatgaaggaggaaccagtccttactgcctccctgtgtaatcaaagtagtcattatctcctattgccagggtttccttatctctatcactcatgtcctgtcctgacaacatatttataatgggactctacctacacaattaattgtgtaattttttttctttaaatctcattctttaaagttcaatttttaaattgaactttatttcactaccacaaatggaaagcccatctcacttgctataactagaaggtaattctaaacatacagcaaaaaagaaaacccagatcatttaaacgccacctcgatcttgtcaccccaacaaagactcagagcctgagagcggaggctgattgccaaagtttagagaggtgttaaagacctggtagaacctagggaagacattctctctgtgttaaagagaatgtaaaagaaaacataaccctctcctcattggagtctgtgtcatcctatgctgggtcaggccaccacctaaaattacgccatatgcccctggtaatacccatctctcacgttgttatctagagtgatttccattgtagtttatggagttttatgcataaacagacagtgttctgtgatacctaagaatacttccaaaattcccatggaaggaggctcccaattaattccagtccattcatttttaaaattgctgagtgaggcattagaattcatagaatttgcagacctgtgaattcccctagccagcagcaatcttattagcatatccgtaagtctttgcaaatttgactagggacggtgtgtgtgtgtgtgcggggggggggggggggttccattcttactttatgcatcctcatttatacaccctcctctctcttgaggttgagtttctaagctgatagatcataccttccatctctgtccataaatgcctttgacccaaatatcatgcaagtccaatggtacacatgtcctctaaaacaccctaagtggaaagcattgcctgttgaggattagagtagacatataatcacgtttcatactgagctatggccttcatccaatacaaatgccacattcacttaggaagggtgtgtatacatgggaaacagcaggggaatcaaggacaacttcctgaatcagcctgctcagcaaatccaaactcattcagccacaaacccagttcattcatgcatcagggtttgcactgctctaataagatgaatggaaatgcaaagacaacacttggagggagtcctctccgtgcactgagacccttgtctgaaaatacaagcaactgctgctgcttcacactcaaagagccaaacattttgcatggataattcagaagcagtacgtcactgccccatacacaatcctcatgttaagggagcctgcatcaggaaagcacagactatctacctacacaaagaggtcattgcaaattcctcctctccttcctgttgcattcactttagcaattttattacagaagagactgtctagtccagaagcttgctcagtgatgaaagaagccaatttgggatcctaaatttgactatagagcattcatatggacaactgggaattacctggtttgtgaactaagcaaaagccaaaactctaaacaccttctgagcatctatgaaaaagtatttccaaatcacaagcattcattttttagatgggagttggcatgaggatctcctgcaaagagagagagagaggtttcctggcatgggatggggagtgctgagcaccaagacacatgtgcaagctgaaagcacaccaagtgctcttctctgcatccagcacctcacacacattaactcaaagggctgacaagtccctggatcactcagcaggcaggcagcaaactctcagagcaaacagagttactgctgccttatcttgagctccactattaacacacttgtcatcactaagccaggttgttagtctctggaacaatttgatggaaagggcaaacaccagagaaaaacaagttgacccagatgggctggcagaggggatcaagtggcaataaactccgttatcactcctggttggcaaacaaaaagctctgcctacgcatgcattccagttaactatggacttcccctcatacatgcatggaaggccattatgcagagaaatgggcacagcaaatcacactaaacactgaaactctgctgaagtgactccagtgacttggagttgttgatctaaaaattgcttattcttgccttgacaataaaatcagagtccaagttaataaagatttctagttagcaaagtccccaagagcaaacagtttattcagatcaccagctttctgctttgcagtgtgaagagattaagggtccagggacactcctagttctggttctgcctgtgtacatcactgagcctttgtagacctcagctttattccctgtgagacttagactgatcagcagttctcaatctgaatgtgatgacagagtagcagaggtggccgaatatagaatcctcaaaattaacttacaaccaaaggctggtatctgtcagtagctttacatgtattgactaatttaatcttcacaataaacctgtgaaggaggtactattatcatccctattttaccagtggggtaaccaaggctcagaaaggctgacaacatgcaagggtcacccagccagccaggtgcagaggtgagactaggaatcatgtggtctgtctccagaaatgctgcttttaactactcaactcttcataatctagtgcctctcaataatggttaataatagctatcagtatggccaattgatggcctgattagaggagatctgaggcttgaaataaaaggctactgatactcgcattttaacaagctttttttgagagacaaagaagtggagtttcataacataacctggagtttgcatctcaaaagtgaacaccatccacaaggccaggcaagaagaaaggttggcactggctgaccacacaatgtggttggttccacctcacttagccatggagtctatgattccttggtgctatgagaaagaatgctgcaatctgctcactctcattttgggaggaccaaagccctgcctagcagcaatgacaatcctggccctaacacagctgggagcctcttgacaggcttatctcctccagctccccaggaagtctcccattggctgtcagatcaagatcaccaaacccattctcctaattagctccttggcaggcaaaccacacaggagcagttccctttccaccttgaacccagcagacagtcccactccccagcatcagccagccccaaaggcacagggctcccctaaggcctgcatgccctaagtgtctgagaggaccccatgactacagcacatgtcactaagtccctaacattccaatcatcagcaggcatctgtaactccagccggcgtccctccaggtatgcaaatgccatctgcccttacatgagggaaatggacagcagcggaagttaccaagggcccacaaggtgtcagcatctgggacagaaatgaagttccctccctatcaccaacttctcttttaaagaaccactcaaaccctgccaagcttgtacaagaggagtaaataacaaaatgacacagatgacccataaaggatgtatatttgcttaaatgaaataatagagtacttcacaagtgcctggtccatgtaagacttttgttttgttttgttttaatggctatttcaatataacactaatttaatagatatagtttaaatataagggactgtaaatagagtcttcaaaatagtacatcaaaaatttccttcatgatgaaatagatggcctactatgcttatccagagttattcttgcaaatttctacctgtagatattgttcggcaaataggcaagttcaattgattgttgattttaaataaaagttctaactgagaaaaaaaaagtaagcccataagagaaaccagtttcaaaaggccacatcctgtggattctccttatttgacattcttgaaaagataaagctatggtgatgaaaaacagatccctggctgccaggggttagagatggaaggaggcggttcgatgcggtaaaggcacagttccactgattatagtggtggttacacgcctccatacatttgtgaaaattcatagacctacacaccaaatttttttaaaaagtcaattttattttatgattacctaaaaaataaaaatgtttacaaggcccatgaattgggttgtctctaaaagatgacttttcttcatatttcttccaaattggttcatatttagagcactattgattatctaacaaaattttaaatggaaatagttgcagtggagattaaatgaaataacatattaaactgcttttgaaataaaaagggcatggaggatgtcatagaagtagcggtgcttgcagtaagaagtcagatcagactttacaaccttgttaaatgagggactgaaggcctggggtccccaccactccttcccgtgagccagtgcccttcgtactccactttccttatgtgtgaaaaggggcacctgaggaagggttgtatcttcaagcactttaatcccattacccaattattcacgtgcacagacccataattgggagttagatgttttccttcagtgctcaaaatagagcaagtttgtccctcaaaaccaaaagtactcaggtcatgaatgaaggctgaagaaattctgatctggcgggaaattccactttctgacaaccctgatggtacctctgaaaaaaacaaacacaatgactgcttttgaagggcaggagacagaaagacttaaccagtacttttcaaagggaggaaaattctgtgtcatcgtaagcttgaataaacccagtgctgtgaattgccaaaggagaggttaactgttttgaaagctgtggcatttttctcatcagtgtctcatgaggctggccaggaggggcagttggaaagaaggctcggagatttgatattcaggaagtccaccagacatgcagcattcttgacaagatgcctttcacctaatgtcatattagcaattcagacagaaacccaggaaagttagcacacacatatgccccacgctacacatgagccctcctcccaaaccacagcttcccgtgcctctcttccccatgaatttagtaccagcctccaagggtttctgccttcctttctgcaagtcaattgaagtaacttccagaaatgccttaattacaggccagtatcactgtcattagaggtttaaataaaaagtccccggattctaacctgctgagatttcttgtatgaaatgtacttacggaactttgataaagtaccagtcaactctaacacttaaatgggaaaaactgttgcagctcaaaattcaactctcatgcaaaactccagggatgaggcagcaaaggtaccacctcagcaagaagaaaaaggaagagagaaaaaagaaaaacaggtactccataaattacccacataaatcagtttaggcagactacaattttttttaacacagaaaacgcttaaaggaaaattcacagaaaatccatgattactcctttagcagggcgaaatgtcccaataagaaggagatgtattaatgggtggccaaccacctcttttgctccagtcgccttccgtggagaataatcaacagaaggaaatctaaaaatcaacatagagaggctgcggtgagctgcttcatgggtcctgggatagggggcatctgaactatttcccagcgtctgggggaaaaggagtgaacattttcaagtgcctcatatgtgctggtgctttacttgggctgtttatttcattttttcatgttctttcaaggtgttcttaattctgccttacagaccagtggaggctccagtatgttagataaattccccaggggcaccagttaaggatcactaggaatgcggaattcccctccagctcagctctgccctgaacatcttgatgccaggagtaaattcagggctctgagaagggtcccaaatgttacaaactttaaaattgaactaagggatgaaagtttaaaattgtcttcaaaggaattcctcaagtaacataaccctgcacatataaaagtgtcagcaggctcagattaaagggctcatgaaagagggttatttccagagataagaatccttcatcctcctctgggcagggcagcagagatagaaggcacagccggctgagaccccgccgggcctcaggaagtctccactgttaaacccagcctgcaaagcccttccctcttagggatccactccattagagttgacctgaaagctgactcctttggagtggtgcgttccattaattcatccatccaacaattgcttgctgaggacctagtatgtgtcaagacagctggagatagagcaaggcaccagtcatttcagtgttttcagatgaattccccacctattgcctgctctattcttaatcacaggggcggcccccactatgttttctggcactgttgccaactggatcatactggatttggccagtggaagcactgggcaaagcccagagggcggaaggaagggagaagttggaacctgtccctctcctgtctgttcttcagccatgattaggtctcctccatgataccacctcctctttttgtccttccaggccccagctcctttctcttgtcaacctccgggttgccctacagtgacctacttagccattccactcttctgatgctagggtaatagttccctacattaaatatactctcttgagccactttgttttcctggctgggttctgacctctacaagcattgaatctgactaaccagatccctgccctcttagaacttacattccagtgggcaggaatacaataagcaagtaagcattcaaatacatgaataagaacagttcctgatcatgttaggattatgaaggaaattagcatcgaggtggcaggatttggggatggagagctatatcagctggtaaggggatatctctgctgagatctgaagaacgcaatggatctacctttgaaaggccaggagaagagcatggcaggcagagggaacagtaggtcaaaggtctcccaggaagaactagcttggtgtgcttcaagagcctccagaagccaatgtggccaatgcatctgagcaatgggggatgtgtcaggggccaatgccatgggaaggagtttggaacttacaattgatttcatttacatttaaaaagatcactttggccaatgtatagggaattttcctcattgtttataaagagagacccttaatgcctcaccctgtccaggcatatccccatcttgaaggtctaagagagagctacccctcctaatgagtttgcacaacaagaatgggggggacaaccatagctcctaaagcatggttctgagggagaaacggtggttcccttgatatcagctctaccatgttctgaggccatggtacagaagaggtaaccattcatgtgcatgacagccctgactctaaggggcattgtgggttcctttcttaaccattctggaaggttcctggtgaaaggactgatgcacatccacatagccttgcattccaaggtgatccactggaccgtctagacttttatctctggaccctgggagttgcagacactgtatcagaacctccaaccttccccttggcctgccagaaagctgaaagtttccatgcctctgctttccagctctttctctgctacatcagagagcccctttctcatgtcctcaaagtgacaaatgtatgctgccaagcaaggctgagggaaagaaggaaatagaaatgcagtccccatcatgcattctttcccaaaatgcgactaatctggcatttaggttgtttgctcctttaatcagaatgccattaagaaatctctgccgggtttctgtacacagtttttctctaatgaagcatcaaatctctttcacaaacaatagctgtgtcacatccaagcaccctggccccagccggtgtggctgcagtctctgctaaatgtgctgcctctttcaggtctgttcctcccagaatagcccgccactgcggtactcaaatcaaagtctcgacactgtctagctccagcaacgtggacagacaaaagaaatcagaggttttcaagaagacatagtgctgtgtccctagaatttgacagaatagcttggaatatgatgtttaatgaatagcctttctagtgaacatgtttgtcctggcttcaactctgggcccaggtttgcagtggctcacccaatgggtgtacttatcatccttgacttaacccccaactagtgagctatttcctggagggtggaccttgtcagaggcagaactataatgagatgtccccagagctattagtgaataacatggcagagccctgctgagcatggtgtttgaccaggcccaggtgccatggtctctaagcatatgttcatatatacatcttggaaggcaatgcagcaacaactatcattatttaaggtgcacataacctgggacccaaaaatgccattcataggagtttaccccatagatacactggcacatgtgtgcaaagaccaatgtaagaatgcatttgctgttacattgtttattacagcacaagattagaaacaatgttacaatcagggccaggcacagtgactcacgcctgtaatcccagcactttggaaggctgaggtgggcgggtcatctgaggtcaggagttcgaggccaggcttgccaacatggtgaaaccttgtctctactaaaaatacaaaaactagccaggcctggtgccacacgcctgtaatcccctctacttgggaggctgaagcaggagaatctcttgaacccaggaggtggaggttgcagtcagccgagattgtgccactgcactccagcctggacaacagagcaagactctgtctcaaaaaaaagaaaagaaacaatctattgataaggggctcccaattacatatatttggatacaccaatgcaaagtaaaaatatgttgtagctgtttttaaaggcaggtatataggtctgatgtgaatagatcattaagaaatagtgtgaggccgggtgtggtggctcaggactgtaatcccagcactttgggaagccaaggtgggcagatcacctgaggacaggagttcaagaccagcctggccaacatggtgaaaccctgtctctactaaaaatacaaaaattagccagcaaggtggtgcatgcctataatcccagctactccagaggctgaagcaggagaatcacttgaatcccggaggcagaggttgcagtgagccgagatcatgccactgcactctagcctggacaacaagagtgaaactcggtctcaaaaaaaaaaaagagagtagtgtgaaagtgcaccatcattttttaaatgggaaaattatacatagacacgcatatatgtgtgcacatacgcttgtatgtgcatagattctcactgaaagtgtacactagagattgttaataaacagttttcaggccgggcgcggtggctcacgcctgtaatcccagcactttgggaggccgaggcgggtggatcatgaggtcaggagatcgagaccattctggctaacaaggtgaaaccccgtctctactaaaaatacaaaaaattagccgggcgcggtggcgggcgcctgtagtcccagctactcgggaggctgaggcaggagaatggcgtgaacccgggaggcggagcttgcagtgagccgagattgcgccactgcagtccacagtccggcctgggcgacagagcgagactccgtctcaaaaaaaaaaaaaaaaaaaaaaaaaaaaaacagttttcagctctgggaaggaaaaatggggcattagaaactggggatgaagagatattttaaagtatatgatttcaaacaaattaacttttttttatttttacaagtacatacttaatctctttaaaagtaattttgtaaaagggcaaaatgcagtgctccctgaggctctggtaaataaaccgagaaatcactgactggaagttgtggtagataaaataatgaccctcaaagatgccagtatcttaatcccaagaacccatgaatatgtgaccttacatggcaaaaggggtttgctggtgtgattaagttaaggatcttgaaatggggagattgtccttgattatccaggtgggcccactgtaatcactaggtctttataaaagggaggtagagggtcagaatcagagaagaagatgtgccaacagaagcaaaagtaagaagtgatgtgaggaaggggccatggaccaaaaagtgtaggcagtctctagaggctagaaaaggaaaggaagcagagtcttcccagagccagcctccagtcctgctgacactttgactttagcccagtgagatgatttgggattctgaccccccaaatctgtaagacaataaatttatattgttgcagccactaagtttgtggtaatttgttacagcagcaacagggaactaatatggaggtaaaccttttaaaaccaactaattcatgtgtcagaagggggaccatcagccatgcttacccaagtggaggctcatcacccttgattgatcattctgctggggacaggacagattttccataacactatcagttccaatgaaagctgatgtatgaaaaacatctcccttagttggtctgatggtagcagtctcctggatagaactgccatcccagacccacactggggtgagcttggcagccatctggcctcatcactatgctcttcacagaatgctatctccactctagcatgtgtctgtctcatttatcaagctgatgacatggcggtatgaaaaaaacagatgagaggtcctacctgccgatctgctccaaagagattataaaatctaagaggaatgcctgggtgtgtgggcgggggggcggtgggggaatgtagagaagaacaaagttccttctggagctttgggaaagccgtttgtgagcctggacttcccccagcctttgaatcattaatctggttgtacccaagacatccaacagggtgcagacttgcctcattgctccagaagctgagaccacccccgtaacttgtgaggacggaggtcctaccccctgtgaagaaggctgagacacagagaaaactgagagattaaatttataatcataaccttcctctggcttccagagaactacaaaacaaggacacattcccactgtctcttgtcccaagagtagagccaaaccaaatagcctcaccatacccaacattatgcaacttgaagcccaatcaattggctccacccacatttcatctacaggacattgttgccaaacttcttaggtatcttcaatatgagatttttaaagagctaaagatataacagaaaaagcctcaatggaaattttacggctattttcttttgcggctcagggaacataagcttttatcattttccttcattcaagtaacagctttgccctagctccatggttgtcatgcatggtccatggtgctgctttgatgatttataaccagctgagtcatcatctcactaagtcaaaagagattagtatgtgaacctatttggtaaactgtaaggcactacacacgtctggtggcaaggcttgtaaagctctaaatacacgcataattaatgtgactactccccaagacagatggtataaaggagacgacctctacctatgaaaggaaggggagaagaaaagatcaaaaccacctccttctccagccaagctatgtttgctctcccattcctctccttactcccaagatctaaacatgacaggagtggagaagggaagatgtctttaatttcctggttaatttctcctgcctggattccaagatggagacccaaagggagacctgtgtgataactggccctcaaaggagtgcacacagtagacccaggagcaacagcaaaagttgctgactaaacctggggacagcaattggtatccatccctcaggcatttactttgccttttcctcaccagtcaacttcaaggcccttgaagttgtcaagaaactggcaacctagacatttatatccaaaccagatccaagaattgtatcgtaagaatggaacaataattgaaccttgtgtcccctgctaaaccagagagagcttgtcaacaaaaaggactgagagaagaatcctggggaacgggctaatgagaaaggctacctgaaccttcagaaatacctggggagcttattttatttatttatttattttgagacagaggttcactctcaacgcccaggctggagtgcagtggtgtgatctcggctcactgcaacctccacctcctgggctcaagcgattctcctgcctcagcgtcccgagtagctgggctacaggcattcaccaccacgctcagctaatctttgtacttttagcagagacagggtttcgtcatgttggccaggctcgtctcgaactcctgacctcaggtgatccacccaacttggcctcccaaagtgctgggattacaggtgtgagccaccgtgcccaaacttgcagcttattttaaatggatgtctgggctgcactgcagatctatggtgataaggcaggagggggcaccctaactgaaaaaaaaatctccagatgattccaatacccagctgagtttaggtcctaccacattaggtgacctcccaaaggtcccctcatttgatttccctcccacttccacactgaacaccagcaagtccagagagaaatggccctcggcatccagcagagttctttccagtgcccgccagagtgatggccaccaaaccttcctccagactggctcccattgtgtgcagggcaggcaggacagtctgtaagagatcatcactgtggacaatcggggaaggagctggcctgggcagagactgccctgaacattcatgggacctgcgccccagagcatcagatgggcctctctgctgaaggaataataaatatgtcttttgaacaactgattttgttgttgttgtgtttccacacatatatgttcaccagtgctggtttcatagtagttcagtcgtactgcacaggtgagctagggggctttcttaaaagccagaagactatttaaatttagatttgcatgctgaaatggagcaacttttggcatgtgataaagatggggaaagttgaagaccacaccctgcaacgccctccctgacttactactaccacccatcatctcccattaaaagaaacaaaacaaaacatcattctaatgccagttaaacgttgcatgtattgattaagccttccctcccatctgaaattctccctaaggagtaacattttaaagcttgcagtgagggtcctaaggaggctgctgctttgacagcctgcatgagcagcagaagggaccttgctccctaggccagcatctggatttcccatctggcccacgcctgcagctgcgtaaccctctggcccccctccaacgtgcctcaaaatgttatttcacattttgggtccaaatggacactttctgagaagtcggtgtaacctatcaagctttggaaacaagtttaagttgtttttgtactttccattacccaggttgttctggaacgcagctctaagaggttcagcttgccaccacgtcaaggaatttgagaaaagggaaaaacaaagagggggaaagcctgcacaagaagaccgagggtctggaaatcagaacctggtgttttccaaaggtcctgttcagcctacactccccttttccatttctgccatgctgttggggcaaactggcatgggaagtaggggcttttgtcctaaaggcatagcatcaaggtccccagagctacaaggctctccaattccttctccctggtcccgtatcatcagacaaacccaatagagtgattctctaacatgctgtgctcagaaaggtgaaagaaccaccaggcgtggtagggaggctgtgtccactgttcagcccagtcagtgtggcttctctccctgggctgggctccatcagctcatgctgagcctctgtggcattagaaaaaataatcccttggcctcagggcctgctaagggacttcaagccagatttcattcccattcacttcctaagccaggtaccctgtgcagggcatgagagccagtggacaggacgcccctgcacttgggagattcggtaccctgattaagggaaagccacctccctggctctggggaaggtaagagacctgagaaagcaacagccttggatctcactacattttgtgggctacttctgaaaaccacactttgaattccagtcccatcactgaccagctctggactacctgtgactttgaataagctattcaatctgtgcctcaactccctcccccatacaatggggaggatgttagcatctatctcacaggtagagttgttgtgaggactaggcagagtaatccatataaggcactctatcattatgttgttagatcagtttcaagaagcacattttccaacataaaatgatttgtgaaactgagatcttataatcagtccatatgttaatacatacttaatagagttttctcccaccgcatcctccaaaacagcaggtattaaatcaatggtgcatctttctcatcaacgtatttgagttaagaaaatatggtcttttaattaccatttcatgcatagtaatggctgcaatgttaaagactcacttcttcctgggtaattttgcagcatagtctctaccagcacccctggggatgtaggtgcctaccaagccaccatctcctttcttctccagcccctctggactccttcaggtgctctcaaacctaaactcataaaatccttgccagatccttagggagcatccaacaagtggttctgagcccgagctgctcacagaaatcctagggcactcgctggccccacaggttctgattccattaatggaagtgaggcccgggcatcagcatttttaaaagctccccagatggttgtaacatgcagtggaatcaagaactctggctccagtctgtccccacctccatctgatgcctgaaatcccctcaatccctgcagctaatgagtagctggccagcctcttccaggagaatcaaaacttcactgacttaggttgcagaacaccataataaagcagaggttcttcctcaggcagtgtctttgttgttctgagataaagaaaaagaccttgaaggcaattctaagctgggaaatgagaaaacctgcctcaaatggagtccttcttcccagccatcttaagctcagatacctggaatttatttattttgaactttgtagaaatcttttgacttacaaatgacctaattctctaaactagctatgctgagaatgcaagataacttttatgctggcttgattccataagaaatagtgactcataaggatcatcatcagaaataaatttctcaaaacttttaagtaaatctgtttctaggtaaacttgatggacttttgaaggattatatttcccccttctttttcctcttgcatccataccaagctcttttctttatggcagaccttgtttcctctccatcttctactttcatagatacagtccatcaaatcatacacatgactcatttcaccaaccacgaagattctaccatgcactggagaattagtgagttggcttcaactgcacttcaattgacgccccggaggtgggtaagcatacatttccacatgtatgcagatagaaaaatatctgattgggcactaaatgtttaattctctgagaaattggcaatccagtgagaaagctacgctaggcatcctagatgcttttagatcacagtaatggaagcatctcacaacagcctaatgttttcaacccatcagaaagcagagtcccagagagcctatggggactcaaaacaaacccaactaaagccaggtggagtgacctctcatctcagactccaaggcttgggagtaggaatgggcaaagtggagacaagctgccaaatattaggggtgcgccatgtcctacatgttggatgggccctttacacatgccatctcctttaacttccttctcacagtaagtggggagacagagattagaatcaggctcgcataaggtcacaaagatagtaaacagcagacctaggacttagccctggtccctctgatttccaagcttccttccaccaaatggtggagtaacttgctcccaatccatggatccagacctgggaaaggggctgcttctctgagctccaggagctattggttgagaatcctctcttttttgcatccctgggttgctgcccacccccatactgctccttaagcacttaattaatggtgtcctgtggccagtcctgatgatgcagtttttcttggtcactctgtgggccacagacttgcagctgccaattccccctacaagcattgctcgggtccaggcccactgtaggagacaccctgactactccggtgcagatctcacagctaccatgactgtttgttcagcccccacattctccagggtcccaatttcttgtcccacattcaaaaagaatgaggttatgctgccagccagtgggtgagcaaggtgaaaagttttattaactgatgaaacagctgtcagcagagaggggacgtgagaattgtctaccacccaaagtcaggtagtctctgtgtcccagtgtggctgagtccagggtttttatgggctcagaaaggggatggatactgattggtctgtgagtatgcaaaaaaaggcaacagtgtaaaaaccaattggggaagggtgggtataggtgaagaggtgggggttaatcagaggaaagcatgccaaatgggaagagaggttctcaatccagtctgtggatttatccaagacttgtagcttggctttcagactttaaactggctttggtttgcaggggggggtttcactggggactcacctgtgtttgcctagggatttgtctacctcctgctgtatcactgagttcaaatccccattctaccacttgccagctgtgtagccttgggaaaattactaacctctctggcctcagtttctccatgtttgaggtggaaataataatacctactctgctctgaacactaaatgagctcatttacgatggcatttagaagagtggacagaagtgaatgttccttctcccattattcatattgactccaccagtactgtctcacagggtcactgtatcatggcatccatctttccatgggtacatgtcttgtatagtccttaggggaaggtcttgttcttctctcctctcctcagggtccactcacttatgcattatctcataaaggatactgaagcccattgagggcatttcctaatctgaaggggcctctgatagacttctactacttaagtctcccatcactttcccacccttaaccccattctagaaaaacccataggtaaacagagtatacctgattttctaatacccattgaatattttatatttgtttttatactttgcaatgaagaatgtttcagtaaatttcctaaaggaaacaaaaaactcatagatgatataagtaagccatgtcacccctgggcttcctccaccttccactgtgtactacaggcagcacagtccctcccatgctgtgctctgaccttgcctgaccttgccaccctgagtgtgacctgcagaccagcagcatcagcatacccaggaagtcagttagaaatgtgaattcttgggccacagacttaaagactcagaatttgagcccatggattcttgcttcagggtctgtgctcttcgccaccacactacactgtttctctttatcagcaatgaaattgagaacagactcattgcaagacgctcattgtcagctccgtcctctactgacttcaaaacatcatcagcttttcacattaaatttgtttatcacccgtctcagatactatctttgatatcagaggtaagactggcattgtggacagatgttttcatgccttgacccaaaagggtaacaaacatggatactgcaggccaacacgaaggaattgtgttgatgggccataagaaccacaatgggtcccttaaaccacacctcagctacctgatttcctgcacatagggccagaaatatactaaggggaaaatggtagaagggaaaatgagaacaagaaagaatgagataccctgcaggtgtcttcctctactagggaggcccctgagaaatgactgaatgtttttagcaaaagattagaagaataatattatcttgccatctgttattgcttatagagagccaataagtgtgtcttagagattctgagttccagggatgatcccactcaggttccctgacccactgtgagtcatacctccatagcagaggggcccctaaccccaggatttccatgccttctgcaagctggtcttttagatttcatcagcagtcagtcctgtggccatggaacggggaatgatcgatgacagcccactgaaggaggaccttcttcttgtttgcttggttctggggaatgcatctcctaggcaggagcaacacgtgccataatggtaaaataatttgggaaaaaatggcaaaaaatatttgcttttgccttaaatctaccaaaagtggatcacaggttgaaaactgcctgatcttggtcgttcgaagcccctgagtggctcagtatttgaactcagtgcagccctgagcaaccaattaatatttgcccagtgggcaggattgacttcagttacctaaagatgttactactgctcttctggttgcccagagattcccacaccccgtgtgcagcacagatccagcagagactccttgccaaaggccattgcggtccaagaccccaaagaggaaggctccagaggtgactgctgcttgggaagtcaatatcggacatgagtgctagaaccaaggtaatgcttcccagacttcactatgcccaccagagacctggagagcttgttaaaattttgactgctgggccaagagagctggggctgaacctgagaatctacatttctaacaagtctccaggggatggtggtcgatggaccacactgagaagcaccatgtctgaaaatcttttgagccaaacattttatttcaccaatgaagaatttgggaccagagaggctaactagtatgtccaaaatcacccagcacatcagtgacagggttgggaccaggtgccctgactcctagtttccactgtgttcccactctatcagcttaccttaaaacagcaatcgtcatagtcattttatgaactataactcattttgagtaccaaatgcttttcctatttcctcttctttatctttataatcaccctttgaggttgagggcatgggtctcaacttatagagaaagaaacgaaggttgaaaaaagtaacaacaacaatgaaaattggctctagatcacaagccaaggagtagagctggattctacccagttctctctgaccttgtgctgttcctctttacatctcttcaggttctcagaggggagctctctctaccaaaggtttaatgcaagacccacatagtcacctagcttacggaaaggacaggcctgaagactagggtaaaattaagatgataaaacagtgaacaaatattttaaaactatgtccaggaggaaagctagaggaaagagccctaagccccagctgctccataggctacctgtcattctctttccaaaacctttcaggggtttaagacctagaaccacgtgtctgacaccacagccctgtaaattctgtccccaagagtcctgaggctctgcgcaaacaaaattaatagcctgcaaactctaaatgggtgattacaatctataaagcagcccataaaatgacatcatggggattcatatttattttctcccactgatttccactataaatttgcttggtttatgagtagaaacagtttcttctgctacgtgcctgggcataaagctcacctaaagatggaaacctaaagatgtctggggctcacttcacccccagtggtgctctggtcaatgggacacacagaagaaacctcccaaggaagctctggaaaccccaaagcagccactgcctctacaaacatgccctgagagcctgctgagctgcaggcttctgtgctaggtcttgagcagtagccaacaaaatgggggtggtctctgccctcagggaccttgcaagggtccctgaaagggaaagaggagacagacactaaacagaaaactacatggataacacatgggggttcattagggaatgcaaagggaaagtacagcaagctatgagctgtggaacaggagcagctaacctgatctggtaggggtgatgcccaagaaggatgagtaagtggaggctaagcaaaaggtggggaaagggagaagaggagagacattccaagtagagggatccacatgggtagagcccagctgtttgctgctgttgcagttgagccacatgagtatcaaataaagaatgacaaaaattctgggtcagacaacacatataggatataataagattaggttttcttccaagtgcaatagaaataaatgaagagttttaagaaaagaattaacatgatcagaaaaccatcttagaaagattctaccagccgcagttagaagaatggatttgacagagagggggtgtttaggagggaatgtcagcagatttgtaggacactattgcagttgtctacacaagaagtgatggtggcctgaactaggtaagaataaatgggccacagtgctatctaggaggtaggaccgattagggctgtcagacccagcttacgcaaaaagggcagggcatttaggaggtgcacagtagataatggtgatcactgacctactggcacttgcaaatgctttgaatccaatctcattagccaaggtcaatacctggaagccactcagaagccagtattggtacgaggtcaagtgaccacctcaccagtgcaacatagcacacgcagctcaagtcatccccagaccagttgacactctcaacttgcaaaagaacacatgaggtagaatccctttcctttaatttaacccaagctctactactgcctcagttcaaaggtcatcaattgcaagatcagcagaaggggcatggctccctgaatcccaacaaggctacaagggttttggttttacatagctcatccaaagccagtctcttctggccttcagaaatttctccctcttccaagctccaagggcatttatatcatccctgtacatgcagacacagtccccaacttacaatggctcaacttatgattttttgagtttacaatactccaaaagcaatgggtattcagaagaagctgtacttcaagtacccatacgaccattttgtttcctactttaagtgcaatattcaataaattacatgcaatgttcaacgcttatcacaaaataggtgttgggttagataattttgcccaactatgagctaatgtaagtgttctgagcacatttaaggtttaaggctaggctaagccatgatgttcagtagatggagtctcgttccgtcacccaggctggagtgcagtggcgcgatcttggctcactgcaagctccacctcccaggttcaggccattctcctgcctcagcctcccaagtagctgggactacaggcgcgcaccaccacgcccagctaatttttttgtatttttttagtagagacggggtttcaccgtgttagccaggatggtctcgatctcctgacctcgtgatccaccctcctcggcctcccaaagggctgggattacaggcatgagccactgcacccggcctaaacacatttttaacttatgatattttcaacttatgatgggctatcaggatgtaacaccattgtacgttgagaagcatctcattctaccttgcttagattcaatttggaatcacaacttaggctgccattgttgtctaataattgcatgttcattaacctgttttccaaaaagactttaagccaccttaagataagcacagcatacccagcgacaaggtgctgtagatgagcacctactaaatatcagagaaagaagtgaattgactgggcccagaagagaggaaaatgccagtctggtgatgccagaccaacagagaggagtgagtgggaggacaggctcagcactgaactatctagagttgcccttgagtcctagccaagatggctgtcactccccaggtgcccagagatggtggctttcttgagcaattgatctgaaaataggtcccctaagcagaccttgtcactgaagttcacacactgcccaagctgagtgccatgctgagcatagcccagatgaaatgattgctcatcttgagggcaacatcccagacaaaccagtcccttttatgtctcactcactatggagggaaagcccctgctctcttgccctcaaacattagatgggcttacagaaatgcattcccatttcataatgcctgctgtgattccaggtaattcctctaagtgcactattaaatcccagcagctgttccagataacagcaaagtcgacaattccagctgccgccttgtcaggaaatgaagcaaagcagctgtaagtttcctaacactgagacatgaccaaaatggcagcatgagggatcactcatgtgcaggtttctccaccgccatgcagataatgtgtgtccaccatcacacatacattacctgccctgagtctactctgatgtctgaggctggaggactcaaaactgtgggccatattcccctgagatacccagctacagttatctttgagatcctcatgagaaagaatcccaaattaacactgagcccctacccataaagcatgctcaaggtgctggagaattgcttaaggccacacagctaaaatggccgccaagtcaggatttgaactctgatcctgtgagctccaaagcatcaagcttctctatccttcactgttccctactgctcttaaagccctgtatttcccttacccaaaggagcccggccatctcaacagtattttcgccatctgggccaaccacgtgccggcagagtgcataaataccacttttgtgaccaaaactgtatttcctcggttgatccaacatcagcatctttgcacctgcaactttccttaagaagaatttttccatgatgtgatgacagaatttgcagccagcaaaggggatcatagacatacatgtacacacgagcccacaaccatctacttcaaagcctcccagcctgaagtacgctctccagatgtctctatataccaggtgcttcgaggctggccagcatctccctgacagcagaacaagttagtataaggaatttctatttaaaagccaagttctacaaaagctaagccaagcaaggttctaataaacagtaaaaccgccacgttgtgacacatggcttaaagttggtcactcacctaggtgggtcagaaagacaccaatgcttttcattttccccagcacctcaaccctggttagtgctagggtgggatccctggtgggagactccacccacactgaacctggctggcttcacttttccagactggtgtgttctccaggcaaatatatattttccccctacccacctccctccgtgtgactcagcaagcaagtgctgggtaggaggagtgctggtagggtgggggacgactctgttctcattccaggctcaaggaacagcctcagtcatggacaagaagtataggcagagagtcaggagaccaaggctctagacctgttgttgatgactaagatggcctgggatgagtcccacagcctctctggtctcagttcctcatctataatttgcaggttgaatgatacctgaggctctgtgattgcttgagtcagccaacagctcaatcagccacacagaaacaacctctcctcttctctcttccagcctggataaagcttgtggggcatgagatttatgggtttggtgctgaattgcatcatgtatgaggcagaatttgagttggattttcatgggttgggaggatttgtaaaggcattgaaggcatggggggacatgagtggcataaacaaagaagtggagtcaggaatgtgcttagcgtctttgaaggaaccactagggatgataatttagacagcgtgcactagtacaactaaaccagtctctcaaatattgaaaccttttgtaccggctggtaaacagccaatggccttgacttaggagtgccccctcagctgcccctgctgctgcagtgcctatcccccatcccaaccccatgatccaacaaccaaagggttaatttctgagatctcgatccaaaaggtgcccataccatggtgatcctagtcagcccaaagccacaccacacatctaacaagcattcctgtgtgccagataccatcttaggcacattaacatatgttactttttctccccttcacactaacctcttcagattaaggaactgaggcttggagcagttatgtgacttgttcaaggatgcaataacagtatttgaacaaagaccattaaatccaagtccagagctcacttcttaaaaccccagctgcctctgagcagccttggcccgcagacagacgagctttggaggaaataggaggaatttctccctgctatggagattgttttaagatcatgaattgttagcggaacaagttgtcgtggcagcttatgaaatcaccctcttctgcgatttttataagtaagaggggttagaataggcccagagacagagggagagatgaaatgacctaataaaaccctttccaaccctggaacacttcagccccacatgaacagaaaagtctatttattttcaaagccccattttaactcctgaagtacttaggagacttaaatatgtctgaaggcaaaacaagttccctctttttcctcttttcctaccactccaactcttcattgcagattttcttcctgcaggtctgacaaacaccatttttggccacagctgctgtcagttcaaaagtttggctctggggtctgaagaccaaagtctgtccaaggctgatcaccttctgagaaagactcttaaattctgtgaagagtctccagcagaggagaaattggtttaaaaaagcaagaagaatcaccacaatgcatgcccactccacattaccaagcctgcacaactcatgttaggggatgtctgctgctcctccagctttctcccctggcaaatacagtggtggtccctgagtccccattagggcccaacagcaggaccagtagcagcccctgtcagagaaaccacagccagttggggagagcgaactcatactataggcttgtttccatggcaacagatgctccctcctccctgcttctcggcaccagggaaggacaaggaaacccatgagaagacagtggcaactagggggaggaggaatggcagcaagtcccctttctttgaaacccaggcagctgctgccccacatgttgatggttacagctctcagtgaccttggacaagttatgccccagctctgaactttgtttttatcatttaaaaaaataaataaataaaaaagatcaagagattgagagagagagcaagcgagctgggccagagatgatccaataaagctatttcagctctgatgtcccagaatccaatgatttgtctaacctggccagtgattgggaatgggttcacctcttcttgcagccctctgcaggagcatgacattccgcaaggctggagtggatctgcctctcagggacctaagccttatccattcccccagtcatgctgcctccctcacaatggtctgctgtcatttctctgaaatcatctcaggagatctatcccatgctttcctaagggtgcacgggtttcctggggctcacacaagccatccaacatgacaggtgagccagaatgtcatggcaccgcacccagccacttgcctcccacctcactgatgttgttggattcaacctgcaattcagatgcacacagcccactaggcgctagcctgctatgactgcgcaagcgaaggaactccagggagaacacccagaaaggtcattttgtttggtatgaagagtgctagggtgaggtgaggggcagggagtgggacagaagcttcccaggaaaaggggaaaccatgcacagcagccaggagccatggactccaataccccaaggtttggaaaagtacttgtaattttggctgattgaccaaaagtggaaagaggagtgtagcatgagagaagggaagagaggaaggacagaaaagtggacaaagaattccaggagatggccggccgcggtggctcatgcccgtaatcccagcactttgggaggccaaggcaggcggatcacctgaggtcaggagttcgagaccagcctggccaacatggtgaaaccccatctctactaaagatacaaaaaataactgggaatggtgatgcacatttgtaatcccagctacttgggaggctgagagaggaggactgcttgaacttgggagacggagattgtagtgagctgaaatcgtgacactgcactccagtttgggcaacagagcgagattctgtctcaaaaaataaagaatgccaagaggcataaaaacacggcaatgcttccagggctggatttaggggagaaaagggagtactcattgttggaagtacaagccacatgcccagtgctagcttttatgggagtagcaggggatagctgagggccaggttagtcactgagccctccacatgagcctggtgggggtgtacttgtttccattgtatgcatgaagaagcagcaactcagaactacagcatgatttcacctagtaggtcagctaccccttttctggagtatacaatcttgctgggggacaaaataaacaatcatggacaaattaccacatgatttaaaaattgacacacggccactctcacaaccatcctcagaaatccagaagttcagggaggaacaacaacaaattggacttctgaggacttcctgttgccagtggactttaagaaacgttcagcctctccagcgcaattcacccctaacctatcagactccgcgttggtctgtgatggctcatctctggctcggaaatggttaaacagttcatttctgtgcttgaatcaggagcttccttaaacgctagcataaagctggtctacacataagaaatctgattagctcccagcattgggcaatcccaattattatgccctgcaagttgctctgcaggattagcggtctgcggaagaaaggaatcaatatacaacagtaattagggctcctgatgccggtaagaggagcacttctcttccccttaagccactcacgacagagtccatgaggggacagggccttcacagcactgccagtctctgttttctagcatatgttcattttgactttggtttttatttactgaaggatgtgaaattctctgctactgggccaagactttagggctacatacgtcacccaagaacagcgaacaggatgtgtcatgcatgggaccttccttccaaggaaactcagggaaagcagatgctaggatcctggcaaccccaggaaacctaatcagtgtccctgtaaccaagagctctttgagaacaggggctgtgtcttatttaccttatatcaatgtggcctagcacagtacctggcacatggtaagtaatgaacgggatggatgaggaagtgaatcaatgagtaagtgaattaataacacatggttttcagtttgtcaaaaactttatctgtgagcctgctgtgcacagaattttgtaccctaatactgtagtagcaatttacattggactcacaggatttgggggttaaagggaatttgaatataacccaatctggtatttttaaaatcacaggttgcaacctattagtggaccatgagatcagtttcatgagtcctgaccgtcattttataaatgaaatgagaatggaatgaaatgaagtggagtggagtgggatggaatgagatggaactagcaggaaataatagaatattccagaatagaaactatcaaagtacatcacatgtagtaaaggtgagtacaggaaaattaggcttgtacttgcagggcatgagtgtgtgtctattgggtgtacagtgtcttaaggccaaaagccactgatgaatctaaccattcatccagtgattttcactgccctcagaggccacatcagggacaaataattttcctttttgatcccctcttgttacaggaaatgaatttcatccagaagcagcctgtttcacttacagactgtctggctgcaggaattagggcaaatcagagatgttatagaaagaaaaagaaaatgtttcctagatcaaaacacccatctaagtgctggggccatagagatgagatcgattccattttccacatgacaaacattcaaagattttagaatgtcaattgcgcccctgctgaatggcttggagaagagcaggaatagttctagttatcctaacaattgctcctaagatgttgctttgtacctgctcgttatccatcttgattgtgtttatgtaagttccagcccattcatgacccctggtgtgtggcatgaagaccatcacatttgagtctggtctgaagcttgtctgggtgatggctgaggtgaacccatgttagctcctggtgctcaccaactctcttcctaaaagctctcacattatctgttcaaaagcctgcatccacctagcagggtaatttcatcatccctgccctctcgtctgtgaataaacagcttgaactaatagtatttttcaaatgtttttgaccacaaccctcaggaagaaatgtactttacaacatggttcagaagacaccaccacacccccaacacacacacacacacacacacacacacacacacacacacacacgaagcaatgtttacctttactatatataatgggatgtactatgatgttttattctattctgcttcatttcttatgatgttggtgatgacccattaaatagatttcacaagctactgatggaccatgacccacagtgacactgaactagatagtacctaataatctgaaaaggcagggaagggcatctgggaagaatttcacaccaagcccatttcttttcattatgtttatttagccatgtgcctacgtttggttgtgtgtaaaggaagacaatggcttagtgagctgcagccaggctgttttggggactcacaaaggaatggtcacagtttcctgcctgtctcttattgccccccaggcaagctcattgagaaaagacagtgtgagtctcgtacagagcatgctgataactattacagatacgtgattattctcggttctgttgatgataacaacatagctgccatcttgtgtttgtttcctcttaggattagaaagcaaaagcaatctgaagattgaaagtcagaagcaaagttagaatggtgatttttttcccccaacccaacttggaagaatttgtctttggagaaccaacctaatcaaataaagtagcatcaatttactggagacataatccaacttgcataattgtcctggctggtttacaccacagctgttcatatgacatggttcattaaataataaagtcttcatcaggctctcctgcactgggctgcaattcttttcccccacaccaccaaagaagtgctgcctttattagaatgcagtgccacccattggcagtgggataatcaggggatttgtttttatgtgacattctattaaccaaacatcataaactgcatcaagtaaaagccactgcattttccccagtggaggatcccatcaccacataatcattctagactgtgggttctctgtgggcagggaccacatcccttcatctttatattcccagtgctaagcaaagtactcagcattggtgggcgcaagataaacatctattgaattaagaggaaaatatctccagtgtgggattcagaagagcaatgcttagaaacctggaggctccctggttgcaatgagcatttagtgtcttgaatactgtgtccctttcctttctggtttattaattttccacttgactggaccaaattttccaagtccacgtgatagcagacaggactctcaaaatcccctctggccaacagaaggttcaacaacaccaattttgctgtcttcaagctcaggagccctgctgggcagcagggaacctgtgccaatctcagtcttcctaaagaatcccacagttaaaagaggccacctgaaaatgggctgctgagaggtaacgatgaccttggaaatgtcctcaggtttgggaagtcagcaatttggtttacaaagcatgaaaaggaagactcgttgtaaaatacagaagatttaccagcttaagtagtttagaccaactcaaacttgagcttgagcctgcacgggactctcctggagggattgttcaagcacagagggttggcttcaccctcagagtttctgattcaggaatctgcacctctaagatccaggtaacgctgctcctccaggcaccccactttgagaagcattggtttagcctgcttattacaagcaaggctctagagctggctatctatgctggaaccctgaacccaccacctcagccaataattttaggcaagtcatttaaactttcccatccccaagatgcaagtgtcaaaccaaagcaccaagaggatctttctcacgagattgttatgaaggtcaaaggaggacacccactgcttaggggtgtgcttggtaggtagaaagagcttaattaaagttaaccacataaaggaaagtagggatatggtctgggggaaagactgctggtcagagaagccagatatgcattctagctctagccctgcgaccctgacttgctgtgtgaccctggacaagtgacttctttctgggtcatgccctcattcataaaatggggacactggacattctataatggactgaaggtgccttggcgctagaagcttccaaagctccttgctcctgactctatcacacagcgtcacgtacctgtagtgccttcccaatcaccccctaccacttagactgccaactgccaggccccagcaggataactcaagactgccttgaagacattgtctggttccttggccttgaagggtctttccacttggccacaggtgaccacctgactcaccgaatgtagtctaaggaacccacttccacctgggaagtgcaacctgggatccttcttgctgaaaccctattgcactccaccaagattttgttcacgtttcatttgtagccagctccactcatgcctctcattgatattcttttgtggttacattccagactggaagataagggaattcattgaagtgtttagaagggacaagtgtggtttcatcgggagtgttatgctcagatgagtattggaggattagttggggagagaatccacactcgcagagggagatgaggttctgaaatttattatcatagcctggttgtggggaagggagcctcaggaggagggttggaagcccaaattcctaattgaagatgcgaagcccattttcatcttatatttttattagccccatagcagcccactgcactggctttctgctaacagccgatggcagggagaggatgcttgttggcacaaggccgctgtacatttcatttttgtcagatgctggcaaaatttcctcatcagggaagataaattcgaggtgatattaataaacctctgaatgcagcaatcagatctggctggcactcttaatgattccaccagcagtgagccatttccagcctgaggagcttagagattcacggttttgtttaaggcatcccaaaaactagaaattgtttgcttgactcctgggttgagcccgcatcttcaacctggatactcccaggtgccccaagtgaggcagtagtgatggaagagaggcatttacaaaataaagtcttgggtaaatgttactcactattgttttgtacccagaaagtgctaagtgtctcatactatctcgtgtaattaccataggctcagtgatggaggtactatttttaggtgaggtcactccaacttagaaaggttatcattaacaatattggcatcatcatattgcaatattgactgacactaagtgctttctatgtgactgagcttaggattttacctgcattttcacttttcatttgcacaacaagttatcaattaagcactgtgatcgccaatttacagagttgaaaatagaggcttagagaggttaaacgtgaggctcaagatcagactcaagatgcatagccagtgatggaatccatgtgtgttggattctgaagctcatgccgccatggactgtgcttgttacggctcacaccaccatggactctactgtggaggcacaaccagagggccccatgggtctccacttgtagaaggcggttcacctatcatcctaccttctagtatgaaagcagcttgcactcataggcaagcttacagaagggtgcagccccagctcttgacatagaaccaagcacctggtaggcaccctttcaatgtttgataaataaatgaattgatggtcagtccctactcacgtcctagaagatttgtgaaaggacagttgaaattagtctcctatgctgctgtccacctcttggtatcttggtggacctattcaccaagggccaaatgtccctaagcacaggtgagaagagttgaggaaggtttttgtatcctactctgagagcagttggagacttcgttccttggcttagaagtcaagattggatgcagaactaggcaagttgcttttctgagcaaagagagtgctggcccaccccacatcctcccctggctgctggcccgctgcaagccttggcacacaagagaaggaggcagaagtgcatttgtttattcattcacccacaaacatgcctcaagcaattgagcacctactgaggccagagtagttttgggctctgcggagaacatacatataaataagaaaccatccttgaccttgaggaatttataagctaggaggaaaaataacaggtacattaactcaggtgtcagctgtctctggcttctccagtgcctaggcccatgtatacagcatcttgttttgccctgaataactttcatcctgaaggttacacttttttgagcttctccctcttgtccctcatcccaccccatcaccaccccatgccattgctccagatacaagcaaaaaggaacaacacagactgttgaagatttcacaggtaaggcagaaaaggaatttaaatcacatatctcatggcaaatgctctaacagattttgagtttgccttagttccttccaggccaaagcacaaccaaggatttccttccctgaccttttcccacagagttccttgaggtagaaaggtggctccaagaagcccaagtccttcactcgccctccaaaagcctcaccttttcactagagcagtcttcaccccttgtagatgtcattaaggatattcacaaatactcctattacgtcctctttctgggcaattgtaggattgcactttctagtttcctaaagttaagtgtggctgagtgctgagtggtttgctctagccaatgtaacatgagccacatgatgcgtgacacttctggatggaagctcttagccagagcagttcaccactgcctcctgccaagacggtgctggaagcaaagaccaagaggaagtttccatcaatctggtttgctgagtgactctgatgaacagcctccaccctcctactggcctcctaccttcatgactgatatatactgtattgagcaagaaataaacctttcttgtgttatgccactgtgggggctgtctgttactgtagcagagcatggcctcacttgactgatactgccctcttcgaagcagaacaattctgctttgctctgacctacagtcagactttcacactaaaccaaggtgggcactcaccaaacaaaagattctccaggtaacacaatctacactctgtggatggaaagttatggcatcttttgatggtggagcattttccttgaggtcttaccccttactccatgagactcatcaacatattttttctaaacaaaatggtggagaagaattctggggaaagaattctggggaaagagtgtctggcacaaaagaaatatgctctgggaagtgcatgaaaaaggtaagtgtcaaaacagtggagacacaggaaatagtagcattaatttggacataagatgtcttcaagaagaaagtgaagtcccccaaactttcatgcaggtttctctgcaaggaaggaaggggctactcccctaagaacctaattggaatgtggctctgggtgccaaagctgaggctgagaccctaggcacactcaaagaaggaagagggagcttctgtggctctcggtgctctgcttctctgggtcaaacccttcttgccacacaggtgtgggagcctgagcaggccagtccactcctgccctcctttcagcccactccctgggccaggatgcacacaggtatgtattccccaatttgagccctgcctcacttcttcctcgttgttacctgccagcaccaccacacttgagaacagcagacacattgaactaaatatgatatgatgtaactctagcctaggagttacagaaaaaaacccaagcacatttctaaaatattcgagaatcctgtgttgaatgttaaagaaaccaaccacataggatctttataacacaccaaggcaggcactcacggcctgtcctgaacaaatccaaatcttttatccctggaacctacgtcattgtccacctccaggaatctgtgctgttgagctgacggctcctccactacaatgttctgctcattcaagactctgtcctcagtggttcatctccctcattcacatcccccatcaaaatatgtctgacttgtatcctattctttcagggcctttctaagaaaattccaaatgtactctagcagcttaatattttgccttccctaggcaagatgtttatatttaatcaaacaacttctgggaatgatgtatgtttagtgtaaagatatgcattactcagagtggaaattttcagtatgcaacagatcataatggacagaaggctctttgtggagtccgtggcttcaccctacatgccattctataatatataccacatgtgccaaataaatcccctaaatacagctccaaaaataacatatcagtatccattctcaagtaagcgacttctgccatacccagaggagaaagcatcagattaggtaactctgcttagtggtaacattctctaaagatgaaagcacttttcccactgacagaagcatggctccaagaagcccaagtcctgaggatattgtcagtaaaaccacacacacaggtcacagcttgttattaatcaattaattctcagcttgctttgtcccaagtcatccagcagacagaacaagaagagatttacaagctgtgtgcatttaaattaatatttttaaatggcatgagtgtgcaattaatactttcgaagaacatgtccacaccagatcaggcagtgtcggtttttttttcccctgtccatatgagtctatttttaattcctttcttggggaaagacaacagtcctagatttgttttgttttgtgtttttcttctgagactcaaaataaccatgttctttctgcttcagtaaatcattactgcagcttgaaagggttcctagaaagttctagttccattcagtttttaggaggaaaagcaacccaaacacgccaagaactagaagctttatccacaagggagtacgcttcaggatgataccaactgcattaatcaggatagacaaggttatgctgcagtaacaactaaaacctaaaattccaaaggcataacacttaaacatttacttctcactcaggaaaagtcactttgggtctggtgactctccaacacagcttcctttaaagagatgactcagggattcaagctgattgtatcttgtggtctacaatctcaatgcatggcctctgcaatcaccatgaaaggccaagggagagcatggagaagcaggtagaggcattttactgactcggactaggagggacatatattatttctgtgcacaatccactcaacaacaaggggccttggaagcatgggagagtccacaagtatttgatggttattaaatctctctttacacgggttatctcatagtgatgttaagagacttcatgatgttgttactctacttagaaactcttggatttcagcccttgaagaccatgctccaacttcatcatcaaatcctcaccagaaaagacaagaggatacagaacactgagcaactcacaagatgtgtgctgcagatgtgtttatcagaactcaaaagtttcctctcttttctctgtcctatgactattccaggagtgccagacagaactagttcttacgctctgcgaagaaaagagtggactggaggtgggtcacattgacattttggtaagagccctactccttagaaacagaatgaaagttgtcaatgaggggaagggagtaaggactggctaagagtagccatgctgggaagatttcattgcaaattttcctctacctgggagctggcagataaaccagatcattgttcccaaacactggaaggaggaccgactgttaaaaaaaaaatacccatgctggagcctaaatactctatgctagagcctggctattgacatattagcaagcatccctgggcaatccaatgcacagtcatattttgcagtcattgcactaaaggaatatccaaggtccccaccaacactaggatttcacaatttatgagcattttgaaagaatttacccctgaggattgacttattcagcatttaaatgggaactaagaccacgtaattgactgggaccaaaccaagatcagaattcataacctcacagctgttcctcatgtcaactctttctattctaacacactgccatcctcattttaaaaaagggaatgtggccttgatattcccatagattgctggatgcatacttccctgtcaccttccagtagggacacaggcattctattagctcagcagaatacagggctcccatccacatctgatggaaggcaaaggagatgaaactggtctccatgttgaggacagactggtacattaaagaagcaataggtcccctcatttgtacaccaagactcaagagttgaatctttcctttagtgacaagtggaagtccatggaagaatatttacaggcatggaagagtgagtttgaagtggggggcaaattctaaagagtaaagcctttaccaatggtaaactgtgccctttctatccatgccagcttgggaacccagttgagagtctgaaggagcaggacttagctttggacctgtgagatttcctctgtccccatcccaactgtgctcaggcccatcactttgcaggagcataattttatggcaagaggttcaccacatacctattgagctgcaagaggagtgatatcaatgtgcatatagttagggagagcaaagagtgctaatttagtaactgaagataagttacattgtatatgagatgtatttatatgcattttctacttctctctcctgcctcctgtatcactataaaccctagcagtcaagttccatgtcaggcctgttggatctttttcctgccatagagggagggacctgggagatggggagggattcagggatgacagtgttccagagtttgaactgggcataaagatatagaaccatccactggccaaggctgtcataggtaaatcctgcctggaggcaatttctagacagaacattctgtgagcttctaaatgatcctgaggtcggtatgcagatgctgacttaccagatctaatttgggaaaaagaagagggtaagaagttatatcttctgtggggattctggtggtaaggatgggcacagaagcaaaagagtgtttcctccttctccagaacatctggcttcattgcaagccactgtgggctactggagtagatggagagcagacagcatggcaccaactgaacactgtgcccactctccagacctgtccatgcaacccacagtagtggagtggccactccagggtcaggtagatatggcttccttcccagctctgccaattcccagctgaaaacattcttaaacttttccagtgtcctgtaaaatgggaaaaccagacctgtcccattgtatcctagtgagaattacatgatgtcatgccattaaagtacccagtaccaagcctggtacattataaacatccaagagcctaggtcttagcttcttcacctagcatgacacctctcccacccagcttactataccactgtgagatgataaaagcacacaagccctgtcaatgctaaaatatttatgaagctatagagaatatttttttaaattttcaacctgaatgtctgatttttttcttctgtatagagacagggtatcactatgctgcccagactggactcaaactcccataattctccaaccttagcctccagagtagctgggtgccaccatgcccagcttgtgtaagagcttttctgtcacgttctcagcattcctagatgcatgcatcaggacttcaattcatgcttcttcttgcctacaagtgggttctgttggtagctggaaagccaggctatggtggaggcaacagaaggaatacaggggtcccctttccaaacctccaagttatctgggttgggatactacaattttaagagtatcaaggaaggagctggagagaggaacttctggacactcagtatagctctagactctctctctctctctctctctctctctctctgtgtgtgtgtgtgtgtgtgtgtgtgtgtgtgtgtgtgtgtcagagaaagagagtgagattgattttttattttgaactgactaggtgccaccccttcattaccatgctgatttaaactgtcaagactgcagcctggcctgaccactgaggagcaaagacaataggaaaacagaaggcgactcaggatgcaaatgcctcattgttacagaacaataaacagattcacccttttgctaaatgtcaggttaatatcctcttggcaccagctgtgcctctcccctccttccctgccacagtgagtccaggctcctggaagtctgcccttcaccagccacctaggctcagcactgggcgtcgaggagagcaggtgtggctggcacagtaaatgcaaacacaaccagtccaaccgcaaagtggaatcagcctttgcatggagtgatatcctgggacagcctcaagctctgactttggggagctctgggctttgggctacagcttgggtagctgactaagccaggggatggcactaacacatgttctccgtgtacttactcacaagccaagaacaggtaggcaaggagggaggatgaccttcaaggccagttaccaacaggctccaaatgcatttcccatggatgcccactgggcccatccccattcctccctccaccaagtccctatccattctaacttctcatgatcgcttctttctgccttatctctgcattgacattgacactgttgttgctggggggctttgctgtgcttgcctctgctgccccaacaggtctccttgtcgccataccattctccacagtatctgcagagtctccccagttagatgatctggccaggtcactccttaactcagaatacttctgtagctccctctggcttttaatgtaaagccaaacccttagcaagccactgaggaatgagtttgaccccattcctctgaactcacatggtcctttgagtttaccctttgcccaacccttattatccaggatgggggttgactgttttggtttcttcccccccatttctaaggacaggaaccatgcctcttacctctgcacaccctgtgccttacatggggtatggaacaggaaatgtgctcagtagtgattggaagccattcattccttactcagacctctctacaaattgtccctgagtctaacccacaacttccctcactgcaaaaatccttcagattgctcctgacaggactgtcttcctcatctcatctgttttctctgtcctaatcactctctggagcttagctcaggttcccccacaagtctcaccaccatgaagcctctacactgttttgtcttctctaactgcatcccccacgtggaacttcataacggtaggctttgtaatagttactttacacctctgaacctcatctacaaggatggttcacaatagatttgccataaattttaaattatgatgcaatataaataaagcacatagcacagaatctggcacacagtaagtgctgaaaatagatttgtctgatggtgaggacgagcgtggtggtggtggtggtggtggtgacagtgataatgatgatgatatctctgttttatattgcaagacccagaatgtcaattccttctttgagggaaagggccactgcttatagtggtcttgacaaacttcaaaacatatggcccaatgcttatttctggtggaagctttactgaccatattaatgctattgataatattttcatgttattggtattaatcacgttaccagggaaagagcattggattcaaagtcaaatgcagactttcagtcctgtttttccactttgggcctcagcttccttagctataaataaatgagttttccagagttttccagaatgatctgtagtcctttctagcaatgataattacgtggttattagtgagactagtccacaccaaagtgagcctacactccatccatatgggtcatccctccccagtatacctgggccccaaaatgcaagcacaccatggggaaatggaagaaattgggacttatgtcatccaaccaacagaacgccagtcctcacttcaacacacaaatgttttctgttttaaaatctactccagcagcactacaattggcattccccctcctagcagtgggttagcagcagatgttacagcaaaatgatccagactgggggtgattattaacccttctgcacagcatacccatttttgcttctgggtccacacttgcacacctaagacaagttcacccgccatccctgtcatcaagagcttcaccaccttcttgtctagacaagcttgaatcccaagcagaagaggagactgagcaccatatctttgctgctgtttttgttgttattgttgttgttgttgtttgagatggagtctcgctctgtcacacccaggctggaatgcagtggtgcaatctcagctcactgcaacctctgcctcctgggttcaagcgattctcctacctcagcctcctaggtagctgagattacaggtgcccaccatcacatcctgctaatgttttatatttttagtagagatggggtttcaccatattagccaggctggtctcgaactcttgacctcaggtgatctgcctgcctcagcctctcaaagtgctaggattacaggtgtgagccacctcgcctgaccagtatcaaatcttatcaagtatcaaccacatcctcctataaggtgagaaaccagaccccactgtaaggtaggactgcccacaatggtgtaaagagccatctgggaaataaatagtaaatagcccactgcaaaaaaaaaaagtttcaagacagacaaacctggcttctctatgtatagtctgtgcgatcttaggtaagccacttaaatgctctctcagtttcctctactataaagtggggatttttatgtcaacacaaccccaggaaataggctttgagtataataatattcacaaagcacacaaataggcactctgaagaggtcagcccctccctttccaccctgaggaccttgtgggagtgcacacaacgtgacctcaaggtaaagtgggactctgctccactgtttatgacataactgggttgtcttgcacattttaaatatctgtctgtgtctcattttcttcatctaaaactattcatatccccaagatttgttgttgggaattaaacaaaacaatacatgcaaaacagtacttggcgcacagtaagcactcaataaatatgtaattgtcatcacccatgttatcattatcatttaatgatgctgaagaacaagtaagtgcttatcacttcctttaaatcttggcaccaaccacactaaaatctcaggcaggcaggtcaaactgcaagtcagagggccagtactgtcaagtcccaacgaggccacaggaccagttacccatccgcagattatccttggaaaatgtttaaagcatcatccactctgatgtcagcaggtgtgtgctcaggcagtgctagtgtgacatcctataaaagtcagaaaaaaggcctcaaagaagataacctgagccaagaacacaggcgtagcttaactaaaatgtttgtctactcagacaccttggcccctgtccgtggtcctgaaagagacaagtggacaaagactgacgggtggtcatgacttttctttttcccttttgcaaatagttgaagacctcttctgatgcaaatggtatcaacaaaagataacagaagaaaacatatatgggaggtcatgacttctgagacatttccaaggagaaaacagaaagactcttcgacatcaagttcaaataaacaaaattattgagaataaatatatatctatattttttgtttttgtttttgttttattttgtttttttaagatggagtcttgcactgtcacccaggctggagtgcagtggcatgatctcggctcactgcaagcttcacctcctcagttcatgccattctcctgcctcagcctcccgagtagctgggactacaggcgcctgccaccatgcccggctaattttttgtatttttagtatggacagggtttcaccatgttaaccaggatggtctcgatctcctgaccttgtgatccccctgcctcggcctcccaaagtgctggaattacaggtgtgagccactgcgcccggtcaatatatatctatatttttagtcattgggcttccccacctcttataccctgactctaaaatcatcaaaaaacccttcataatgcataccagaaataacacaaatcacttgtgtggtctttggctactgctatggtctgaatgttttgtcccctcaaaatccatatattgaaatcctgtcatccaatgtgatattaggaggcaaagcctttggaagctaactaggtcatgagaaggatctctcatgaatgagactactgtctttaaaaaagagattccagagggccctcttgtttcttctgccaggtgaggacacagtcagaggactgccatctatgaaccagaaagcaggccatcaccaggcatggcatcagttagcaccttgatcttggattgcccagttttcagaactgtaaaaagtgtttttgtgtcaaccacacagtctaggtatttttgttacagcagctcaaatgaactaaaacacctcccctctgttggtctggataataagaaattgaacaacacgaatgtcctatcctgaaaataatttaattcttctattccctcatttattgcaaagacatgacagaaaatatttagtaggagcaaggctctgagatttcaatcctaacctctgattccagtcctaaatccatcactaatcaggataagaccttgggcaaattgcttcacctctttgtccctcagtttattcatctataaaaatgataacaaaaataatacttagttcataaggttattataaaaattaaatgagataatgcacccgaatagcttaaaaagtgcttgccacattgtacaaccccagtaaggataaatgttaatattataattagttttattgttattattattgttgttgttccaaattagacgtaaccacatattggtttgcacaggtgccctttctttgtactgtttctaatatctaaccccttctatcctctgcctgagaaaactgtggacatatcacgtaagatctgaagaaagtttgttcactcacccacccacccactgagttcaccataaaaagaattcagaaatttcttacaatgggagatagtaaaaacataatggccacaattcccaaaaagctgcagagagcttatacaccctcagtccacatcacaacagagccactctccactcccttacccagccatgcttggggccactcctactcacttcctcatcattctgtcaattttagaggagcccacggggctcacacaagctgtgcagatcaccaaggttagtatctccattgccttgctccttggaagaatgttcaatattagttcagtgttcccagcccacaacctaaagcctccaggagtcaggatgaaatacaaacaatggcaatgacccctccttatctggaactcacaataatttcgtaaatactgctatgcaccttggttccttcaatcttcttaacatccctccaaagcaggcggttagtgatctcccgattatacagaaaggtagctgaggcctagagattgacatgacttgctaaaattcacacagctatcagtgaatggcaaaatcagaacagcccaggatggctcttcaggcagcaaagtttagtgggaaaagcagccagggagaactcaagttcaagggagaacttgaatcttaacacttattacctatatgacctcaataaagtcacttaacctgtgaggactcagtttcctcacatgtaaaatgaaaatagtattttccattcaggatgctggggcatgcaataatgtgggagagcactgagccaagtgtttggcacagagatgggattaaataggagggtcctattgttattattactatggttaggggagccccattccctctccaacgtacagagccacacggaatctaaactaaggaggccataaaacacactggctccagtctaagtccagtgtctttctccctgccccccatgtacctgccagccacatgcctgaacagcagagagagagctcaatcatcacatgtggcttatctagagaacttttaaatcccacgctggcctgacccaccccagctggcatactctcaggcctctgacactggcagcaggtctgagcatgaggaatacagtatctaatctgagcaataacttgcttatccttatatttaatttatacaaaagtgctttatgatatatggcatgatggcaaccatgggtcagtgaaacatatgaatttccattaaacatatccacttccataaacaaccattcctgttttgagtaggtagagccagtaaggatgaaatgatgctgaagaggaaggcagtggagggtattttataaatatcaatattcaaataccacttaagtcctcatatttacttaataaatatgacaatgggccaggcacagtggctcacacctgtaatcccagaactttggaaggccaaggcaggaagatcacttgagcccaggagttcaagaccagcatgggcctgtctctacaaaacctttaaaaaaaaaaaaaaaatcagctgggtatggtggtgcatgcctgtggttccagctgcttgggatgctgagatgtgaagatcccttgagtccgggaggtcgaggctgcagggagctatgattgcacctctatactccagcctgggcaacagagccagacctcatctctaatatatgtatatatatataaaataggtaacctgtcccctgtcccaaattgccctggggagcactgcaaagccttaaagaaatacattggggattatctgcttgtttggttacccaagctgctacttcctttttgtctataattaatgaaattagaccatgcacatagatgagatccactcaagtctacaaatattgacagcactagatatacattttgaggccatgaaaatgcaatgaggaacaagacacaacccctgttgttacgagggcacagcccattgtgggagacagattacatagcatttacagtacgataggctgagtacgcaggggtaagggaacacagaggaggaacatgtttcctgaatttggggcccaaagctgagacctaaagcgtgcacaggagttggccaggggatgagagggaaaaaaaggagagagagttgctctgagttaaggaaacatttgagcaaaaaatccatttgtaaacagagcttggggacctcagtgctgccactgagtgacaattcataaatgcagcaactctcagccacccacccaacattattctgtgcttgatcaagagctgaagcagcctccagctgctgccaccttctgccagcagtgttagttccatgagggctgttctgcccatggatcattgatgatctgttgtcccctgcatgcacagaccagaaaccccacctccccacctgctgctgttaccctagttgacctcctgcctcactgggtggcagaatggacagccctgccatctgcttccctccccagagcaccaggcatggaacactggggatttatggggtcaccaggcagagctaggagggttttgcagtggtagggaactagcagtacacttgaacacatccatgggatcacagcaaggaggccaaatgagataggatagggattcaaaggagaaaaacagaaccacagaagtacacagctctcagatgaaagccacttaatcagcctcatcccattttccaaaattcagacaaatgcagagaaacactgggcttatttagcagtatctatactctaacacacacatacatgcacctgtgtgttaatctaattagacagcttttctagttctaaaggtgaaatgcacgaagagcaagttcttaggttattttctctttaagcaagggggactcttacatccaacacatgcaacagctatttagtaaaacaaacacatgttttcattctgcttcctgcttggagctccagaatggcctcatctggtcaaggaaggtctcggttctgccagcccattcgagaaggcaaatagcaatggtatagatggcatagagcaggatgtgagtcctataccttggattgccctggacagagggcctattgtctcctctatttttggaccaaatgggtgagaaacagcttatatcaagaatggcctggcacatgcctgtaagtccagtactttgggaggattgaacccaggagtttgagaccagcctgtgcaacatagagagacccatgtctaccaaaaaaaaaaaaaagaaaaaagaaagaaagagagaaagaaagaaagaaagaaaagaaaagaaaagaaaagaaagagaagaaaagaaaagagaagaaaagaaaagaaaaggaaaaagaatggcctggcaaataacccaaagtcctctcaaagctacattactataaacgagtcgcatgcttataattcaaaaataacatttgtgcctaaattcaaactaacacattttaatggaatggcaacatttttaggcctcaactcattctgggctcaaaataataactagaacttcatagcatttgcttgtggaacccatattccttgagcagtatctccctaggcaacagctccagtatatcctgcattagaggatatttcagatgagatgcacttgtgttgcctcagactactacggagtgactccgcagctgctgaagtgttgcctaattgaggatctactttagaaacgatgtgagtgtgatgggtaattggcacgttttcctgcttctgagagtaagctgtgcgctccttgggaggtgaaacccacttccttgtctcaccatggcttgaatgacataataggatttcagtatatgcaattgttgagtgaataaatgaataaagaaacatattagctgaattattgaaacaataagatcaagtaagcccacatagatttgttcaccttcttcacatgccccctgcctgccccaaccacacctcctttcctttgccttgtttgattttccaccaggctgcttattatactatcggacatgtaagcactttacttggaaatgtgtttattttcacatgctgtgtaaagtccaaagggcatggatttttatctcattcgctcaccgctctactcccaccacctagaactggtccctagcaagagttcactgagcattttgtgggggagttcattgtaagactctttaagaatcactctatctctaaacagaaatgatggaagatgtttttgttctgtgtatcaagggtctttatatatgtaaattaatcaaaaattaaggtgtatttgagggcgcttggtcttaaaaatgtaaccattccaccttgcactgttttcttacaaaaatctttgtaatttggccccaacataccatttgagctttattacatcatcttcttcattaccacaatcatcactaccatcactgttatcattcacaattacagaaaacatttaccaactgcctgctgagtacaaggcattttgaaaataggtgtttgggggccagaaaatgaatgggatgctgaggtctctgttctcaaactgcccatctaatgcaagcgttgagacatatttacacatgaaacatacactcagtgtcaaacaacgggttgaaccagttctgtctgacagaaatataataatgagagctatatagctaatttaaatttgtctattactcatattaaaaaatgaaaaataaacaagtaaagttaattttgatactattttgcataacccaatatatgtaatatattataatttcaacatgtatccaatatttttaaagttttattaatgagattatttttcttacttagttttggaacatgtatgacacagcacatctcaattcaggctagccatattcaagtgtctaacagccatatgtggctactggccacatattggaccctcagggttagactaaaggattttcagagtacagaggaggggacacatctcagcaggcacaggagtgtggagaaggtcccatgagaaaagcctctccccttccctccttttcctgctctttccttccccatcttcctcctcctcccgtcctcatccttatggaagcacaagcggtatagttgcaggggtaaataggtgtcccaagatgaaaacaaagggaaaccttgggcttacccactgagagtccctgttccacactgcctcttcttctctttctcctaggcacagccaaggaaggttaaatcccattccatcactaatgagagatctgcccacaagcactaaaataagattcctctgatcttaaaagaaaagtgtttttggactttaggcaaccctggggacttagagttgttctcaaccctagcatccatcagactcacctagagaaaattttaaaagtaaagatgccacaagtatacactcccagattctgatttaattggtctagagtgaggcctagggatgtttgcaccttttttaaaggctcctaggtgattctaatgtgtaactagacctgagaactgctgggctggggtgcagaaattgcagagtggaggagaggaaagagtggccagttggctatgatgccattaaccacagcactcagcatcactttatgtaccctttctcgttggatccatatgataaccctgtgtgacaggtaccactaacctcattttgcaagtgagaaaaccaaggctctaggaggttaagcaacttttccagggtcacacagttagcaactgggaaaggaagaaactcaagcccggtcaggtctgactccaagacccatgctcctcacttcatatcaccccttgtccctcctcttcatcaaccttgccctccatttccactccaccaatcttggttcaaggtgagaaactgggatgggaatgagaggatgaagaaaactaggtaagatgcagggacaggttgggaaaaaatagtaatgcatacagcagatgcagggggaagttgggaaaaaaatagtaatggacacagcagcaagggagaaacctccttcatagatggccagcatctcccagatatttttttaagtgctagatagattaagtgttgaaaggacacatgcaggggagggtgctgatattgactacgagacttgtttggcatcatgacaaggaagaagtgatgagaaaaggtgtcccagaaaattaaccattacctagcttccacagaggatcctgccctaaccaacagataggctagaaagaaggctacagaacagaagacaaagaataaaagagctgtacacaaagatatgttctttttctgaggtttcatacactgtgaaatttccaagtagtgaaaaattaactcaatgcttaaaaaaaaaaaagaagatgaatgcaaagaaagaaaaaaaaaagaaaaatctggcaatgttggaagagaaatcagtcttgcctgacagtatttaaattgaatgtctgtgagcatggcccacaatttttagtgaaagtagaagctattaaaaagtcgatgcacaagattaaaatttagaatgctattttaataataccaaattctactcaatttcaaatggctgtcatttttaagctccaccaatttgataacacttgactgatggcattgggagctgagtgatgggaagattgaattcggcaggtccagctcagctgacacagccagagagatgaatactcatcctcaaagaactaagcagaccaggctgatggacctcttagaatctgttttcccatctgtaaaatgggactaacaatatctgccctactgaaaggaacaagtgtgatggagggtgaatgaaccattgtcaaaagcattgtgaaggtcaagaatgcattgtgctcccgctgtgggtagagcctgtgctaggtcacaggtcacctctttctggaagcttcccacatctcccaattctaacttagagaatcaacaagtagttggactagtcagtgctgggatgagaacatgctcaggatgttccagaactcggagacaagtcatctgtcacgtcattagatccaccaccttgtaggactgggagtttgctctgtgtacctagcactgtgcctggtatacagtgagtggatcctcaataagtatttgtagttccctcattcaacaggatcttgtccctaatgttttgactttagatgggaagacaaatatttaccaagcataatataagtactgatgcagagaccatcagagcattacagaggaagaagaaacactaggccgggcatggtggctcatgcctgtaatcccagcactttgagaggcccaatgccaaggctaaggcaggcgggtcatttgaggtcgagttccagacctgcatgggcaacatagtgaaaccccttctctactaaaaaatacaaaaattagctgggtgtggtgctgcacacctgaaatcccagctactcgggaggttgaggcaggagactcgcttgagcccgagaggcggaggttgtagtgagccaagattgcaccactgcactccagcctgggtgacagagtgagactctgtgtcaaaaaaagaaaagaaacagaaaaatcatttcaactggatattgaaaaatcatttattataatcactgtggtcatgtttaatgctgttgacaaatatttcctgctcttcacatcctaggcatgcagcaggattacattaccctgcaccctctgaagttaggctaagccatgggtcctacactggccaatgaaacatcagcagaagtggcatatgtcccattttggcagaaactttaggagctgtgcagttctccatgttttcttcctgcagtatggcaaatggaaggacatgttaaaatgaagaatcttgggggaaaatggctccagaagcaggggtttcagtacaacctatacagaacatgaaggacaagcaagaaatacacctttgttgcagaatccgactgagatttgggggccatttgttattggcgcctctctttactaatacaatcatgtcaggaggagctccagcaaagtatctgtaagggaaggggtgagtgagcctgaaggctcttgagagtgaaaaggaaacaggactcaagcctctctttggtcacagactcagctaccttctttcggagatttcctccacagggatacactgaaaatgccactcaggtttcagaagcctctgagtgaggagccccagactcctgccttttatatacccatctcccgccctcatgccttctggaaatggtgctaagtatagctgggttggatccctggctcaattactacatcacaaccagagactgaggaataaacatgccagggtggggctttttctctttgcccgggatggctctgcctccatctctctcagctctcagcgaaaatcctcccctgcagccagaggcccttacagaccctaagcctctgctcctgctcttctccagcaggtgctgcctccccttctcatctctgcatctgtctgtcctgcagagctcagttcacaccccatctcctccagggaggaccactacagactccagcctattctgtgctcatcctacgagctttgaacccatctgacactcaaccatgccctgtcatcagaatagtgctagcttgttcatctgggcaggttggatctcttcaaaggagggaggaacccctaaatcttgatgatgtcatttgtgaaatgaggcccctgctctgaccactcagaactgccattgggcatcaggtgagttgtcagatctaaagcccctgtcttggtgccaaatacctaacaggtgctcaagaaatgtaagactcttctcaattccctttgtctacaagacagtttgacaaagtgggaccagctcttctcctcccacagtaagcccagatgcgtctctagagatgtgtctcatgcatgtattctcaatgggggcaaagtctcctccaggaaggcagacattgaaaagtgaaaaaacaacctttatgtataaacacagatacatacagagtacacacacagatatacagtgtatctgtggtattaaaatctcatggggagggggtaaggaagtgtttttttaatgcttagaaaagctccataggtatgcaataaaggaaaaaaaaaaggcaggctcttccatgcccatctcagctgagcctcttatcacttgtctcttatatttcctctcttgtgtctcttccaaatcaataaagtgatattttagaaaattctgccaaacccacatttctccctcctccaccgccttcccagcctctctgctcctgtgctcatctaatctgctgcctttcctgggatgtcagccttgcaattggctacagggaaagcaggcactggagagctgagagactccagtcttggttttccagacatagcagatgtgactgtgtttgtatctacccccagcaacaccatggggaagcagagctaggcactcctgcctcaccccacctccccaccacccagcttgactcagaatggtgcctcaagtcaaagacctgcctgcaactcccaagagaactaaatgtttccctccactaggggagggttactggtgggtttgggcttaggctggtttgttggaaggtggctgacactgcagtttggctcacccaaggtggagtccaaccttgcctgtcctcgaagatggaaagctgaataatcaccttccagcctcccttgcagctataggtggccacgccacatattctgcaggggaagatgtctgataaaaagcaggagggaacagcttaacctgatattgcccttcccccttttctttctaccttgaaatggacccaaagtctgaagctctccatctctcttgcagccatgagtgaaaagccaagggaatcctgacatcctacagacactatcttgacatgatgtagcagcagcactagtgccagaaacccctacatctagacttctacttgtaggaaaaactgcttttctctctgttacatgaagcccaaggaatcctaactaacacagaagtcaagagtgacaggcacagacacatgaaaaaatgctcatcatcactggccatcagagaaatgcaaatcaaaaccacaatgagataccatctcacaccagttagaatggtgatcattcaaaagtcaggaaacaacaggtgctggagaggatgtggagaaataggaacacttttacactgttggtgggactgtaaactagttcaaccattgtggaagacagtgtggcaattcttcaagcatctagaactagaaataccatttgacccagccatcccattactgtatatatacccaaaggattataaattatgctgctattaagacacatgcacatgtatgtttattgtggcactaatcacaatagcacggacttggaaccaacccaaacgtccatcaatgatagactggattaagaaaatgtgcacatatacaccatggaacactatgcagccataaaaaaaggatgagttcatgtcctttgtagggacatggatgaagctggaaaccgtcattctcagcaaactatcgcaaggacaaaaaccaaacactgcatgttctcactcataggtgggaattgaacaatgagaacacttggacacaggaaagggaacatcacacactggggcctgtcgtggggtcggggggagggggcagggatagcattaggagatatacctaatgtaaatgatgagttaatgggtgcagcacaccaacacggcacatgtatacatatgtaacaaacctgcatgttgtgcacatgtaccctagaacttaaagtataatttaaaaaatgccaaaaaaaaaaaaaagagtgacaggcataatccttacccatctgacttccctggagtctctttataaacacatctgtactacaaaacagaatgactagtgcttctcaatgtccagagtgcagggagactcagagatgctctgccatgctttaggtcccagggtcatggcctctctgcagggggttaagcacatgggctttgcactcaaattgacctggattctagtcctaactcctccacaaaagctgtgtgatcttagacacctcaccgttctgtatgtccgttgttttcactgtagaatgaagttgacaacagcacttatctcatagaattgttgcaaagattaaatgagatatatcacacactaatctcagtgcctggcacatactgtcttctcaatacgtgttagctgtcaagataattttccactttccctttctgggtctaagtccttctatgagcttgtctgtctcatttcccaattatttctcagtgttttctcatttccttatctctgtagctctttccttctcctttctctgtttctccatctctctgcatgtgtctccatttttgtctggctttttctccctcctccctcattcccattcaggtttacagtggagaaacacagcaatttgcctaattttccctctcccaggtcaagagaaagcccttcccaggctctcagtcacagttccttagacgtgggtcccccagatccccttgtgttctgaaatgcctgtgatgggaaggggaggggatggtgatgtggtctcctgccaggaaaagttgctgaaggttggggctggtgaagggggtagtgagagaggggcctgctgccctgcctcaggaatcacgtccacttcatgactggctttagcagctgagtctaaaagctttggaaggaaacgctgggtccaccactggctccattcctgcctccctttctggcctaccccaggattccttggcagaacttggaatttggtatagtcagggacaaactcttctctcagatgcttactgtcccaaatggaaagcaagacctaagtgcataatcctaacccaccatggacagacccctctggctccacagcacccaaaagacccctctggtgaggggagcaagtcaccaataataacccacaacacttgccctgcactgatgctgcttcaaaggcctttcctgtgccaacctactgacatccttgcagctgcaccaaggaacagactcctctttccccattttacaaatgtcatggcacatgggggctaagtgatatgttcaaggtcacacagttataaatagcaaagacatgttccaatctaagcaataacaacagcaataataacagcaacagcaaaataatattaagataattttaatgataaaaacacaatgtagcatttattatatgccaggcacatgcaagggctttgcatctattagctcattaaatctgacgcctaccctgtgagataactactatcattgtccccattttacaggtggaagggaaggtcaagggaaattcagtcatttgcccaaggcctcgataccataagagtgtggattcagggatgtgcatgctgcagtggccaaggcccacaatcttatgggacagctgaccacccaacccccagccagattcctacaagccccaggagtaaacactcccatgaagaatcagctcaagctcacctccaggctgagacaaagggtcaccaaggactggccaccacacgaatgcttctccttggtcttacaaaacatgaaaggtgctattatcagaagccatgcctgcttgcaaactacagaggtgacacgaggtaaattcatttccttcctgtcaagagaaactcaacaagggtataatcagaagctaatgtgtgtactgtgattgggcccatcacggggtggcacataattgaacaagttctccatgcctggaggagcagagccgagccccatcactgggaagtgtcactcatctggccagcacacattggtttttaataacattatggaaataatgctgcagggctgtggaaaggacagaagcttgaggggcagggcctcatcaggtctccgagagctttgaccttgagaaagaaccttctggccccatccagaatagccactttcctcagggatctctcctgtaggctttgtggatttatgtctcctgggcttaaggaacagggcttggtgtggctgaaccttcttgctgaatggatcccaggggaccccaggtgagcattgaggccgggttctcaagagactgaagggggtcggggggttaccagagagaggacaggccctttgcttccccagtaactgttgacaatggtaatacctccatggcccctactatgaatcagataattttctgaggactttatgtatattaactcatttaaactgaaaaacaatccatgtgataggtattgccattgtcctgattgtatagataaagaaattgaggcacagagaggtgaatttatctaagatcacacaggtgggaagttgtgtttgagcccgggcagtccatcatcctaaccatactccctactgcctcaatgagctgacacagcccagccctgataaagggggtggcagaggggagggggatgaggtgccttcctggctgttggcattcatttcattcacatttttatcaggcacccctttcaaccagatactgctgtaggcactgaggatacagtggagtataaatagataagagttatattctagcgaggagacacaaatcccatataaatgtacaaataagacaatttcagagaatgccaaatacaatcaagaaaataaaaccaagaggtcatagtgtccgtggcaggaaaaggtaagtaagttattttagagaggaggaaaaggtaactttaagaaccagagacaactgtttaggagaaggcctagccaagactgaataattcatgtgttaagaggttttcaatcacctaccaaatacaggaaggaaccagtcattgaggctattgagaagtcaagaagttagagacctatgaagacaaaggcagcctgggctctgctccacctgcccactcatgggcctaggcatcagaagctccgccatcttgcactgcaaccctggaagccacagtctcttcagtgccatcagggaagacagcaactgcaccaccacacacaggcatcccctgccccagcccagaagtgatgcacatcccttagtgcctcatgtcctgcctaacagtggatgctggaaatttacaggagcaactggaatattcataagcctaactgcctcggccaccagcccacaagggacactaatggagacagcagagttgcgtgagggctcacgagctaagaggtggaacccagccaggctgagtagaaagtaagccatcgacaagcagggagttaataggtttttccaaatgaacggtccttaatttcaattcattgagaggtgagggatcaggtgaaggaagcaaggtgaaaaggaggattaatccatccatcaaggaccttgggtactgaaaacatgaaaagatgaatgcatttgtgagacatactgattcactaccatgagaaataattatcttgaagcttatttggtcccagaatcaatctttatttaaccgtacttatttttggtggctcatcctgcttgcctctcttggaaactcaagaaatgctttctctatttttttttttgggtaaattccaaagacttgcatatttcatatttttcaacaggatgatctttgtgtagactgactgtcttccctcttcactagtcctctctatcattggacctcacccgtagtaatcactcactccacaatcatcttctcttgtttcctgcatcactcatcactaccttaaagtattatttattgatttattatttttttataatctgactcttctattgtaatataaggtgggtaaagacggagacctttcctgtctccgttggccacatccccaacaccacaccaatcaagcaacagactaaggacacagctaaataaatgaacaaaaagataataataacaatcatgtgttagtcttcataacaatcttcatttattctttttgattattcccatgttacaaatgaagaaatggaggcacagagaataattaagtaacttgctcaaggttatacagatattgtaaaacagccaggatttgaaaccagagagtttggctagaggttccatgctttgttggtataaatatttaagaaatatttgttgattgaatgaataataaataaatgaatggcttccttgtgtttcctgccttctttaccagggttatttgccttcaactttcactggaccctctatgtatcaggcatggtcttaaattctcttcacacattattcagttgagggtagtcccatctaccatatctccatagaatcggtcccaagcctggtacttagaactgccctgcattgtcaggctccccctttgccaggtggtgcctccctaatctgaaatcatggactgagtaccttcaaaagaaaaattaaaccaaagatcaggaggagatgcttctgacttagtgagtctagaagaccctggcctcccttgcccactctgcccagaaactgaatcccagagagatgaagttatgggtttcatacctgtgtctgcccatcaacccaagggggacaaatgccaacatagaatgacagagagggaaggaagaaagtgtttttcctaattaattggctctaaaagtggagaggaaccaagttgggttattatagaagcatcagcgtccgacacaggtcttcaactgccatgcaaataccccctactctgcaccatgcagttcccatggtttactctgttgtgatgtaactgtgcatgtttctacctgaacccattgaacacggctttgtgcttgaaccttgaacaatgcctgggacacagttggtgctcaataaataatgatgggataaatgaatgagggatccccattctcctacctaccttggccttgtcatcatctctcacttttgcgactgccagataacacctagctctatccccttgagccatccaagtctcagacacattcatatactgactgaccttgaatacatactcccttcctgaaagagatgcttcccaggaccctgcatcatggaaaataggaatatcatggtaaacgttgctttaattgaacagtggaatctatgctagtcttcatgacgaaccttgaaacacaagagtgctgcagtaaccatcattcctgaattgtggaacttcacagactcaggttagccccaagtgatgctttgctgagcaatttaaaacccagtcatgcaaagccaagtgctttcatgtttgagaaacaaaaacatttcaactgctcagcacatctaaatcagtactcccttaacaacccaccttggttcttccccttgattctgaaagccaatttagtaagaaaagcatattaataatcttgccctctcactggccttccctccctccctcctattccagcatcttgcagctggtaccttgggtcatttgttttgtttttgtcccttaggctgaagtgcgtccacagttttgaaactgctaactagagtttatatggaaaattcagattagaaacaaattcaaatgcactctctcattttcctgtaatacactgggtttcttcccccaatcagctagaagacttgctgggtacctcctcattgtgtcctgttggaaagtgtctcttctggtcaccttgactgttaaataagtaaacagactcattggggttgctgtgtcctgtgacattggcacagactctcaccccagccaagcatgcacatatcaatgggccaccatctgtggcagaattaccagacccaagatggaatttgatgcatctgtcctggtgaaatggcattatacttctgccatattcttctggttcaagaacattgtcctcaagcccaagggacagccctgtccagcataaacatgattaaaatgcccattgcccgactgccctgctgaccaagaaacatggccaagcacagagtctgcaagcagcctgcatgtgggtctaaagaagaggaagggggaaagtgtttccagaaagtaaggttgccaagatttgaatctcaatgtcacaatctggctttatgaccttgggtgagtcccttaatcccacagagcctcagtttccccatctgtaaaatgaagagtaccaatatcctgatgtgttgtgaggattacatgagatcattttcgtaaagcaccctagcacagagcctgatacagtgtcattgggagctaagatttaccagcactcatcatataccaggccttgtgcatgaaccccacctacattatgtcattaagcatcactgcatgcataagaaatgggtgttaccatccctatgttacaacagagaagactgatggtcagaaaagttaagtaacctgcacaaaggcaaggaggtagagacgagtgaacttaggattggaactcaggactctcttaaccacatgaagagaatccaagtggaaggtgcctcctaccaacgctgagatgaggttcgtgtctgtgggcccctgtctgaggctggttgacaagaagctttagagagacgcttggggatggcaggcttgcagccagaggccagggtttgactcctgtatgggctgtgtgaccaggggcctctttaccgctcgggtgtgcttcacctccttcctccataagacaaggacaactgcatcttccctgtaagactattgggaataaaacaatagggctttgtgacctttgacctaaggtaggattcttatactaccccatgctctatgacatgataagaagacagtaccaacactcagcacagtgttaaaagattccagcaaataataatggatactaacataataatagctaccatatatagaatacattatatttcagaaactgtactaaaaccttaattaaagcacttaatcctcaatgcaaccctgtgaagtagatgctttttattatccccttttacagatgaggaaactgaggcatgtaatgattaggtgacttgctcaaggtcacaaaactaagtgctgaaaacttgggattcacatggttgcatcaaaactttattgaaaggattggtcaatccaagtgaacaacacatctggactgtgccccatagaaacaagcattttagtttcactagaatcaccgggataaacagaggcaagctaacccctttactacaggacatctatggtctttaacttgtaaatacgaggaaaccatcaagagggagatagagtatgcagcctttcctgagctttgaggggcaacagtgtgctctgacatacgattcgagatgtaccaagtctgagtcatttaccctaaatagaacagccttccattggctgttggaaacacaaagtaaaacccaaagaagagagaaagcaaaagtgaagaggccattgtcctcgatcctttatcttttgttctctgattcagatcaggagaggtgtgtatgcctgcagacctggacacccgcaagccacatgctgaatgaaggcccacagaagtcccaaaaaaagatggaaccagggaaaggaggtcagcctggaacagtcctgggaagctgagacccagcccagaacctgctggaatcaatagtctttaacacaactgtgacattagcttgggctgctgggatccgtcttgaaagaagaagctttgtatatttctgctcttattccccacaggatccagaaatatatttctgtaattcttttagctgataagtatgaaaaacagaattttaaatattccagtagggacctgacagaacagggccatcttcattagctgctgaatttcccaatgactcctagaaattgacacaattagacaaaattaagtgcttctgtcctgaggataggccgccactgttctttagggcatatctttgcaaaggaaggtgctggaattcctcacaaaagccacatccctctctctctcacactctttctctgagcaaatctaaaatctagtgccaaattccttggagctaattctaaaaccaggaaagctttttgtaagattataaagattgtattggactttgaagatgagtccctttgctcagcaacttactttcttaatgcaatccctgaattctccttgctatgctctgaatgtttatgcctgcccacccccaattcatacgttgaaacctcatcaccaatgtaattatattaagagatgaagcctttgggaggtgataacgtcatggagacagagctctcatgaatgagattcatgcccttataaaagagcctccagagagctgccttgccccttccaccatgtgaggacacagcaagaaagtgccatctatgaaccagacagcgggccctcaccagacaccaaatctgctggtgtcttgaccttgaactttccagcctccagaactgtgagaaataaatgtgcttatcagccccccaagtttatggtatcttgttacagcaggccaaacagactaagacattcctccatcctcccatcgactgggcaaaaggataatattacttccatttctatggtgattatggaaactcagacccagcaagtggctcccaacccactgggtgagtaagcagggaaactgaggttaggaaatgaactcagttccttttctccccatcatcttttctcccctataagaaacttatcagcagttcttttgcatgtagagtcaatcagaaaatcattagccaaggtcagacaagaaaccacagctttggtttctttgatttcaaggttagaataagagcaatggaactttaaagagcatggatggtagtaactgtctctgagaagccagccactcaaactttccaggcccagaatcaacatttatttggaaaaactttttgttgtccatttttttaaagagctctaaacttccagtgagtcttatgtagatctatttatatgcccatttcttcttttattttttgagacagagtctcgctctgtcacccagcctggagtatagtggtacgatctcggcttggctcaccgcaacctctgcctcccaggctcaagcgattctcctgcttcagcctcccgagtagctgggactacaggcgcctgccaccacacccggctaatttttgtatttttaatagagatggggtttcaccatgttggccaggccagtcacaaactcctcacctcaggtgatccaccagccacggcctcccaaagtgctgggattataagcatgatccactgtgcccagcctacatgcccatttcataggcaagaatactgatgcatagggcacaccacactttacaggcacaagaatgaacaagtctttagagggtaactatttcttgtgcaagaatcaaatgcaactgctgacacttacagttttatcactggtgacagcatgagtggctgagtgagcaggatgaatcttgagcctggggtgtagaccagagcaggggcttccaggtgctcacacctctggaaagcaagaggaactggaacagttggagttcagaataggctaaaaaatctcctgccagtcttcacagcagaatctctgagtggagcacacagccattttgaagttggcctacttggatgccagggctcaaaaattctaatgtggccaaagaaaccttcagagaactacagcaaattcaactgataaatttgttctactctagaaaagacactgccaaaattccagtccctatctatcagggaccttggataagtcccttcccctgcatgcatatcatcacagaccatcctcatatgggggtggggagggtgtctctctcccctcttcagctgccttcctacctccaggggtgcaccaattcactgtgatgacctcacaatcatgcctggtgattatgaggacttagtgggatgatgctctgggcaaccacagggattgctcaccggtgactcagtggttgactcaaaggctagagggtggtttgggggtggaggcagaggtccagtgagctgggctccaccctttctctccctgcagtcccaactccatttttatctgtgctatatgttggagtctagccaagatgtcatttgaacaaagattctgaaagatcaaagaaaaaagtttgaaaaccaccaggacaatgctttcaggggactttatccaaaagactgcaacaatgtaaagagatacgattgcttttattactgtgatatgtttaaagtattataaattttttaagagctttgtaagtgacagaagtgaagacatgctcattttaatgttaccagtcaactctgagaagactaaaggtcaagggacaatgaaaatgtgacccttaccaacgacagaaactcccaggaagccacaattaactcaagaccaccaggatatttggggaagtttatccttctggaaaccagaatttctgatttgtggaaaattctatagatattctctgccagactccagcctatttggtaagctggccacagatgatttagaacacaatgaccctgatactcactagagctctgagtgtggctggataagcccatttcagcagcatgtcagcccctccctgaactaggctctgtcactcagatctcagatcttagggcagctgtagtctgccccttgctttcttattaccccagataaccaatgttatcctctgtttttccttcctcccagggggaaaagaattcagaaccctagtctgagtatatgaattagactctgcaaattgtttatatgagtcattctcaaaactaggtctggagggtccccaagagatccacaaatttcttgcaatattcatgtaacaatgttcatctctttagatctattaccattgagtaacccattgatatttaacaacaaaacaacagcaaacaccatcctgatagctttaaaagcaaccctgttcttctaattgtttctagtgcatgctttttgaagctaaactagtagactggattgtcctcaagtagactggctcaccaaaggtgtccacaacaagaacatttcaagttcagattggacaggaatatttatgagggtttgaccagtgctagacttgccagacaatgtgcctgaatagtctccctgaacttctctcttaaacacaaacaagatcctatgctggctttctggccacacctgtgccagccacaaatgggctaaaacacgtgaaatgtgctgtccgcgtgcagggttcaaatcagataacaaaatacacattgacggttctctatagaatgaaaaatatcctactttcattgcatgctggtgttgggtcagaaaacaacagtttcttatttctcctggttagtggtcctttggaaatcacagaggaaatacatgcagagagttaagaggactacttcacatctgttgtcccgtgatgctacttaactgaacactacactcatgtgcccattcccgttccctttcccctttatggtaaatgttgtcccatatgactttgtgattgatggaaatgttctctatctgtgctgcccaatatggtagccactaaccacacatggctattgagtactcaaaaggtggctaatgcaaagagaaactgaacctgtaatttcatttaaacttaaacaaccactcgtgtctagtggctaccatataaaacagtgaactaagtctaaaatttaggatcttgcagtacagggtgtgtgtgtgtgtgtgtgtgtgtgtgtttgtgtgtgtgtgttaacaaaacaaacactgctccttctgtagtgagcactggcctatggccagggtctaaggaatatgcaaaagaaagtgactggaagttttaagcttttaaggttttatcaaaagacatttcttaccactccctctgggcagtactgtagaacatctactagggagaggatgatatgaagatagagaagcaacaaaagtacagacacattagaggcaaaatatagatgccaccttgtaaactggttgataattcagaaaatgacagctctccccgacttagttggaaaggcaaaggccaaatgggaaacatcagtctcttcacgtccatggaagacaatcccctgaatgcaaaattagaacttggtggctatttcctgatccagccccttgtatttttcatgaagcttaaaggagattaatgggacaatcaggatattacagatgagaagcacaggcatttcaaatgaggctgtgacaaatggctgggaggcctttagaatgggggaagagaggatgtggaacaagccctggactgggaagctcctcactatgattcacaccctggtcctgctaatgaccacctggccaggagaccctggagaggcatccaacccttccctgagagccactggacagaggaataggagccccatcactgagtggttgtagggctcaagaaggatcatattggcagcaagaactccagaaactataaagctctatttagatgaatcacattattattaaacagttcaatcaacataataattattaataatagctaagatttattcagtgtctgctattgccagacaatatatatgcaaagtctctagggcttacagcaaccctataagatatgtctatctatccacatcattcgtgcttactagatgctgttacaagtgttttccatatatatgaaggtatatataatatatacatatataatgcataaaatttgtaaatgagttaaatgaggattaatccttacaacaacctataatgtggacattacttgtatcaatattttacagatgaaacaattgaggccaaagagataaagtgacagccaccatcatcccaactaagttggaaggccaaatgacaaaaggaaacataagaacgcaattacctgaatgacagattagaactcagggattatttcttgatccaggcttagtcaatggaagagctgggacatgaacgcaggcacagttggtgaacagtagagccaggattcagactcaggcagcctggctacagggcctgttttcttcaaccccatggcatcctgcctctttttttgggggggggggtggtgggggtggaggggtggggatggagtcttgttctgtcacccaggctggagttcagtgagtggtgcaatctcggctaactgcaacctccgcctcctgggttcaagcgattctcctgcctcagcctcccaagtagctgggactacagatgcgtgccaccacacccagctaatttttgtatttttagtagagacagggtttcaccatgttggccatgatggcacgatggtctcgatctcttgacctcgtgatctgcctgcctcagcatcccaaagtgctgaaagtgacagggtaaggatttgaaactcaggcctgcctgcctgtctccaaccactcagtcttttcttcagccaccctgcgtccgttacaattcacacactgtttgtcaccactggctaatggctttggatatttcttcctcttatcagtgtgagacatctggggaggctcccctttttttcaccatttgaggactgaaagtaaatttagcttcctcagcagaaagaaaagaagctgttttggaggttgggaagagctttagaaaatgcggcatcacgtctgttgccccatttgaagaaagcagctctggaaaaggcctaggacattagttgctacaaagttctagatcattctgtgtggtaagtatgccatcatgcccatagcactcttctctgtccacaaaattcgtcatatactaataaagaatgggtgtctttggacaaagtcaaagcaagtttgtccagagtactaactaagaagagactacagagggaagcaaaaggtagttcagtggctgaattatccaaggaaaggcctagaatttgagttgtcatagactgagcatcaaagattatgtcttggagctatatagaacctttactgcccaaaaaagagagactatggaaacttcagtgctctggtaaacatttctttgatgccttaccaaaacatatgccttctgagcatttgatatggtttggctctgtgtccccacccaaatctcatcttgaattgtattcccataattcccacgtattgtgggagggattccgtgggagataatctgaatcacggggtggtttcccccatactgttctcgtggtagcgaataaatctcatgagatctgatggttttatcaggggtttccacttttgcatcctcctcatttttatcttgctgctgtcaggtaaagaagtgcctttcacctcccactgtgattctgaggcctccccagccatgtggaactgtaagtccaatttaacctctttttcttcacagtctcaggtatgtctttatcagcagtgtgaaaacggactaatatagcatccgttgtccacttcctccttccatcagtctgcaaaattccatttggggatccatgtggcttcagggaaatcaactttatcaatgttctctgttccgtggcagcagtgatgggttcagggatgggcatgtgacctaagccagtccaatcagagtgactctcaggtcttgctgaaagtgcctggaaacgatgccatttccttcctgttgggcatgatgaaggaagcatctagccccaggagctccttcagtcatattagggcctaaaaggtgccagcctttgataaagacaccaaaggatatgaaagatagcataagacagaacggagagatggaaagaagccagatccttggtgatattgttgagccaacagatcaagtttggccttaagtcagccctaattctgtgcttttcaattagataagacaatacatgccctttattatttaagcctatttgtgttaggagttctagtctttgcaaatgaaagcacctaactaatactaatgtagatctctgtggccatccttctggtaaaaggagaaggcagagtcaagggtgacattacatttcctgaaactggcagctccatctcatagaaaactcacgcattactcagtgaaaaaacgaccccctgtacacaatatccacgtgggaaactcctactcactcatcaagacccatctctaatgtcccttctgtctcctagactacatttacgtaaaattaatcacttccttctgttttacttccatagaggcatattactcattcttttatgtaactataaacacagagcaattacatacagctcaagggcagagaatgtcttattcatccctaaatgcatcaaacccagcacaagcacatagatgctggattctccaggttgcatggcctttaacaagttctctaccattctgaccctgttttctctcctgtaaaatagggctaattgtatatgtcagaggattgttgtgaaaaatatcaataacggaagctacaggaatttcactaaaatgtgtttaattatagtaaaattaaattgatacataattttgtaaatcttcaatagtctttagctcaatattgatagccaaaaattaagcctggaggatagaaataacttcttaactctacagttggaaaagtgtgggcatagaacttgtctttgccttctagatcaggtctgtgttggtaaattagacaccgtgtggcctttcaacatccaggagcaagatggcaggagaatcatgccaacaactgaggtaccttgcaggaaatcaaacaggaagaaatcacccaatgggatcagctgggcaaacatgggtcaccccaggtctggtccctcaagtctacccaaccaaaccatatcatagtggatagctattatctttacctgactagcattcattgccccttctggtatgccctattccccactctcaatccctctgttttaagaatgcgcccacctccaccttccatctccaggagtgatatccacccaggtttgctcagtaagactatgagacctatcttcctggctgtggtgattggttcagaagcaacatgccaaccaacctgatccaatgagagtgagttctaggacttttgctggaactactgtatgtctatatataaaagagaatctatctttctattgaaagccaaaggtaagaagccaatatgatatgcatttgattctgttacggaaatccacataaaagaaggctgcccaagtataaaaccaacacagaagaaagcagaggtaagagatggaaaaagaaatgagtgaaccagtgacagcaagagactgaagaacatcatttgattgcctggaatcagctaagcctgaagagaagcctaaccctaagcttttcagttacccaagccatcaaattcccatccccatttttttggttcttaagcagcttgaaccatagttgtctcacttgcatgcaagagatccctgaagatacatgcagttcctcaggtgaagattgccatcagttaacagatcctggcacccatggaccctgggacagtcattctggtagcatcctctggtagagaataacatagtcaaatctgacagtcagagagtatctgccagcctctgcttagatatagcccactgaaagggagagatgattaatttagccttgatttcaaaaccttgtcttgtatattccattcagcactttttatcttcctgtattcccctggttcctctctagctgaataaagaacaatttttaaagcaaacatcttcactgtgtatctagcaaagctttctgcttcattggaatatgtgatttatttaaaaaattaaatttcccatgagacgcaataatttaaattaagagaaaagcttgtctttcttaaacttcagtttctacatacaaattgatgttttatagattccagaaactttcactgttatgaagatggctctcagttttcctgctggattcagattctcttcatgacttaaaacaacatgaggaggatgagtcacaactgtaagctggtgaaatgcagaaagaaccacctaggaattcaaatgtcagcttaagaaagacagaatggcttaaaaatcaaagatgagatgaagtggactgggggtctcgggaacaccaagtcacaaaatcagcttacagtcagagggaacttgcaaatgatctgattcaagatacaaagaaaggttttagttcttgaggactttttccagataaatatttgagccaaagcacaatataagaaaaagatgcaagtggaacagctccttcaagcagtgggggatgttaaggaaaagcagggaaaatcagctgagaatcctccgtcccacccccaagactcctgcaacctagctgagagccacagaactggtcctctctctccggctgttctccaacatcccagagccttaggtggggctacactaagaggaagtcctccaaggaaactctcaggattagaccagtctttttctgctagtggtctttgataagcctacatggtaaagagtgggattcactgacttatctgtagtagatattattaaatatgtctcaaagcatctcccccaccttctcacacccacccattagaacaggatgttatctacaggctgatacctccccactccctccacctcccttctaatacatggcaccaagacactgcctaggacctaacaagtgattggcccctccttctccaagacattcccctcttcctttttctcttttaagcccagagggcctgaccctctaacgcctgtcccagaccactctctccctccaggagcctgccaagttgaacacaaagtcctaccacccctgccctcaacacagacttctccaaaacaagtccacaaacaccattcaggatgattcctgctaagacccacagggtgggagtgataaaatttccagtaacatctaccatgatattacttacaatcctaaaagaggaaatgttctgtattacataaaacatgtccaaggtcctcctacaagtacgagtgaatccgtgcctggttcttctttgtcttcggatcctgccacctcatccctgtcgtcatctgtctaagttttgctttagaagccaccctcggtcaaaccttcactctcttacacaatgagctgggcatcctcagtttccccttcatgctaaaagtaagccccatgttttgtgcatgtgcccacaccatttcctcaagttcttgctcctaaaggtaacagggcctgggtaaggcacttcctgcagagatcaaaggagactcgttcacacccaggaggaggaatattcttcctgttctaccccatttaaccctgtcccctcaacccagaggtgtcctcactgtccagcaagtgcttcaggcctgcagttctgctgttaccctattttgaatctcataggtgtggaagcatgtgttggcggggaggggcaggaaggtttgtccgccaggaagaagaaacgagtgtgtcggtatgtgtgtgtgagcgccgcaatgacagtgctgccaccgctgctgctgcatgtgctgggtctttgaatgtggcatctgtcgggctcagtgaggatgacagatgtctctctgctttatgaacaaacaacacaggcctgtggggtgacaaaaacagcctcagcccaaccagagcggagaggtgcagttctctgggaataatcagaagacagcagcgtaggagtccagagtctaccacacacctgctcccctaaaaaagcatgttctcattatgaaaccttagaaggcagctcccacgccagggacaagtataagggagcctgtgtggcctcattcattaccagatgaaccactcattcagggaagtcttgaggcatgtccaggaaatggcgccccaaagacccagttaacccacagggtgagtgcccacggagatgggagctctgggggtgacactgttgagccagtggatcaagcttcaccctgagtcaaccctaattctgtgtttttcaaataaataagccaatcaattttcctgttcatttctgtatccccagcacctagaacagtgcctggcacacagtaggtgcccagtggacattcgctgaaagaacaaacgaatgccaaggcagaaaatgggggtgagaggcaaagatgtataaaaaaagaactaagcagagcaaagcgataagaagaatattaataatatgaaccacaaagacaggaaagtcatctgatttcaatacacaagagtataaactcattatggatgctgaattacactagtgatagtttaaatatttcttggaactgaatatgcacataagaagagcccatcccaggcttgaatgagtgcacattcttgtcttggagaaaaggaagaaaaatatataaagcaataggtacaatacaatgcaacagatgttctagaacaaaggcctggagctatgattccagggcagcctgcaaagatctcccagtggagctgatgattagcaggccttgaagcaaggatggaagcctggcaagaggcaggtcagtcatcacaggcagggatgacagcttccaagaactatgtcgtctgtgagcccaggggccagagagctgctgggtttcccagtctttccaggctatggccaaactgatgaagccatccttgtttcagtctctgattccttcagagaagaagaaagagttgagtctagcagagtctcactctgcctggacgcctgctgtaccaggagagcactccctccacatgccactctaaacagaaatactccccggagcacctgggacgaccggcatcctctgcacttccaaggccttcactcttcccagttttgcttacttcttctcatcttcccattcacttcccagatgtgtttctcgggtctccaaagggaaactcaggggagaaactgagtcaagctactttaaatctcctttcctacctggccctttccacagcactcagcccagaagaggtgctctgggtgaaacaaagcagcagtcggaatctctgcaggccacagggagggagggacgggtagaatcaaggagtggggcactagcacggaggcctgagcctcctcactgccaggatgagggagccgcaatgatctggggtactggcagctctgggagcctctgaatagtgaccctggggctctcagaagtactaggtcaaggtgtcccggtgggcacagctgggcttagtcatcaagacatgggtacaaacctcagctcagtcaccatccagctgtttgagtctgaaagttacttaatctctctaagcacagatgttctcatctatgaaaggactataatgcttgtcttgcggggatgttgttagaattacatgtgatgaggtctaaattgctcctagtacagaataggcaattggtaactcttaactactattagtgtagtattatcatgatcgtcatcgtcatcatcatcatcattggggcagacaaatctcagaccaggcctgagaattcccaactctgaattcagagccttttgctccagcaacagaaatgagaaggtaaggcctaaagtagaacaagactagaggaggccctgaacagtgctgggcgcccaaacagggacttcctcccaggaggcctctgtgccactggcctggggtctcatcatcaccgccagcaacagggtgactggctgccccctggattttctgcaagcaaagaacaggagggcagagcagaaaagcccgggaactaatgagattcagagagctcgaaaattagaggtgcacgaaaggagtttccgcctaattgctctgacacctcccactcccactgccgagtcactgcaaggagcaggcgagtgcaggagcaagaggggatccataggtctgctggtccaggtcactgctctctccaggagcactggctccagttgggagtggcccagggcctttctgcggcctggcaggacagggtggccactgcccgtggctggcccagaagagtccaccttgtgggtcaagagctgcccaggctgatatgtgccttaaaaagcgggaacgaaagcaaggcagcacacagcaagcccaggcacctcctcagccttgcaaatgggagctggtgatatgggctcaggaactgccatttctgacccagcccagacaaatgtggcccaattctctgttcccttggagctgagcccatttgtagccatgccaggcccagggtctccctcagtggctgctggcagttgatagcagctgtccttagagcctcagctgcctctcctgcgctgtgtcctccctaaggggcttccagatcggttgtctcacgcgaggctcccagcaggctggaggagggcaggctggcaaggcagccacactgcccctgcatcacagaggagaggagggtggcccactgacaggccagaggcaaactgagacccttccgatccattgtcccttccctgcacccccaagaacaatgacttagccccaggacacatccttaagaagagggcatccctaaataccaccagcccccaccccctatccccccccaccccccccaccccacacacacacacacacgatgctgggataggctgtgagacaatatggaaacagccagaaagatttgcattcaaatccaggttgtgtcacttcctgcccatatgtctttgggtgctttatgtaacccctctgagcctcaactgctccatccataaagcggagcatgactgggagggataaatggaatggcaagaggaaaacacagtgcccagaggacagcaggctttcaataaatgtgaaatgctctcagcatggccctgcctgacgtcctgcctcagaccccgccgtccagctcacaggacaagccacagccttgtaggacactagaattgctgccagtctgccttcagttccctttgttgtttaggagtctcccctggactatcagcttataagaagacatgtatccatcacaagggcctctgataaatctcttcacggaccgcttgcttatatcaagaggcagaacatttagaaaagacatagtgcctgctgctgtctgggccaagccatcccacaagcaggctgaagtgtgagagaggcagatacattccctttcaaaatgtctatggtcccctggtccatgatataataggagagatgcacagctggcttagcttgcgccgtctcccaatgcggacaggcacctgggagagccaagatcgttagccctccaggcaaaccattcaagtcctcgtgctgtcaaggtgacttacaatattgagagtagtttgagattgttaagaattattattattttttttttctgaaaaatacacagtgagtttctcaactccagtttactccagctaacaccacagctttactgttcctcttccaatcaatagtggaatgaaatgatccagttggaattccagttcaggccacagagctgacatcttctggattcccactcctggggattctcagacccaaaggcaaaatgggccctggtcatgggaaagtccatggctttagatgggcagaatctgcagccactgaggctgcagcacacagcagggaccaaagccaggaacagccaaggacactcaatgccactcctgccttatgccagccctcagggtgagtgcataagctcttcccataaaaatggcatttgcacccttagtaaccttttattcaattcaacttcatctagtcctagtaaatagaattacattacttccttgcttaaaacacttccatggtgcctatgcaaaaatgtaaaatactttctctggcacacaaagcccacatgctcttgccctcctctccagcctccttcatgccagtcactggcttggccatccaattcagactccctggcttcacttctccttccttgactgtgcgtagctctttcttgctttgtagtgagacatacactcctccccgtctttgtccagttaattcctgctcccttttctggtctcagctcaaatgttgcctcctcaagaaaaactcccctgactgcttcccagtacaatttattcccactcctgcccccttctctcctatagttccctgttctttttaaaatggacttgtcaatatgcatgacgatatgtttttgtgtttattgtcctcgctctctgaccatgtaaactctatgaagccagagagaatatcttattctctcgaccagtttgcacaatgcctgacacctagcagatcctcaacaacctttgttgaataaatgtgtccatttattcagttctccaatgtctgacttcattcaatcacttataattaaaatgccaatttttataatctccatgaaccataaattaagaaatcactgtgcggccgggcgcagtggctcacacctgtaatcccagcactttgggaggtcaaggtgggcggactacctgagatcaggagttcaagaccagcctggccaacatagcaaaaccctgtctctactaaaaatacaaaaattagccaggtatggtggtgtgtgcctgtagtctcagctacttgggaggctgaggcaggacaatctcttgaaccccagaggcagaggctgcagtgagccaagatcgtgccactgcactccagcttgggtaacagagcaaagctccatctcaaaaaaaagaaagaaaaaagaaaagaaaaaaagagaaagaaaacactgtcttccaagctgtgactggaggcttacattaactcatttatatttgtagttagtaacatcaccatttttaaatgagtgaaccctgaccccaagaagctaagtaaccttataagtcatagaatcagtaagtggcaaaaccataattgaaacctctggctcataacttctcacttttcctaccaaatgacacaagtggctacaacctgagtggccaggcctgaatgggtagccagtctagaactgccttggtccccagccccacagcacctgggacaagacccagagtggcatcctcctcctccacagcagaggagactacttaggcaatgagatgaaattggcacgtttacctgcctctgattaaacagagtttttactggacagcagttgttgaaataatttgggctataaataaataggaaccgggctagaatctgaacctgcttacaaagctagtccttttccatttgagtcataacaaatccaatccactcggggaaaaattaggaaacaagggggaaaagctttcagtttctgtagcattttaatgaaggattgattgaggttttatgcagcaagaagggcacagctggggagtaattgccaagaaaattgaggtgcaagagccatttacatagaagaatcaactaaggttcctcaccagtgctcaactgaaagcagtagcaattggaccaaatgacaagcatcacaatctcactctctagcaccccaccctaggaaacaaagccaccttgtcactgtctccttcaaaagtaccacaacccaacccaagacaggcaatggcaattcatgtgcatcctccactcccaagccttcagcaacctagatactttgtctggggaccttctgaagaggaggctttagttgacttcttcaagatcacttactaccatagacgatggctaaagcaggactgaattccagatgttatgatcctagagagtctctcaatcaatggtagaactctcatgcacaatcttctttggttgggggcagaggaggggtaacttggagcaggtgatagtgtggctcccgacaggctagccactttacaaggattcaccttctgtcccttcactatgtatcagaagctacactttatggccacgttttgtttcctcttttcttcctcttcctctttactgtacctccatccatccttttatagtgccgctttcaccttggtgtgtgaacttgccgctgacttcccaaatgagttctgagaaccgatttcctgtgctttgtgctctgtgatggttcagcccactcatcacacctctcatggagatctctggcactttggtgggccctacttagaaaccatcttcctccttgatccttcactaacaagttctataatcttaacctcccagggtctcagttatactacctgcaagatgggcagaagaattccagcctagatccccacacaaatgtaggaaatccaaagacaataatatataagggcttggagaaaagaataaaactcagactgcagtgaggtgaataattcagtgcatcctccttatgcagctggagttaattccaaggaagcactttgcaaattctcaggtactatgcatgttctttctttctttctttttcttttcttctctctctctctctttctctttctttctttcttccttcctttctttctatttttgagatcacgtttctgtcttgtcacccatgctggagtgcaatggcacgatctcagctcactgccacctccgcctcccaggttcaagtaattctcctgtctcagcccctggagtagttgagattacaggtgcctgccaccatgcccagctaatttttgtatctttattagagacagggtttcaccttgttgaccaggctggtctcaaactcctgaccttaggtgatccgcccacctcagcctcccaaagtgctgggattacaggcatgagccaccacgcccggccacatgtgctttttaacatttttattatttcatttttggagtcattattatttttgttacaccacacaaattgcaataacattaagagattgagatgatgatggtatgagggtggtgttggtgatgacagtgatgatgacagcaatgttgctgatgttccatagtggtaatggtgaagatgatggtgatactggggagatatgatggtggtggtgatggaagtgatgcttacattacaagtccactctacacacacatgttctttacaaatgtggatgaaccctatctcctgcatggagtgggcagcacagattgtggaggaagctgttttccttccctggcatcttctgttcttggaaatcaatgaatgtccttcattattttccccatagttcctaagaggatactttcctgcttctgaaacattcactatttctataaagtcagtttgtcttcattctgtaagctcctcagcaaccctcactatttgccatgatgctggtcaccgggcctacaagacatagatcttgtctttgaaaagcctgtgttcctagggagagaaacatctgaaaagtgaaagaacatgagagcaaaatagcatgcatactgcattagaaggtgcaccctcattccgcacgggtgtgtcagggactggcagggtcggggatggcttccctgggaaggtgcctttcaagctggccagtgactaaggggtcactcatcctccagggaatgggtggatagagagcactctaggccacaaacaaagcagagaatatacactgctgtagggtatgatctgagggatatgggagatttcaggggaaagagcttactttaagttttttgaagtgataaaatatttgaattttatcttggaagaactatggatccgttaaaggtctctcagcgtaggaatgaaatgagctgaatctgcatgttacgatgtttcctctgtagagcctaaccccctccacttgtgttcccaagagccccagcatcactcaggagcttataagaaatgcagagtcccaggccccattgctaaacctcttgaataagaatctgcacttttcaaaagtttcattttctaaattactatacagtaaatttaattttttatttttggtgtaaagttctacgaatgttagtatatgtgtcaatttgtatagccaccaccataatcaagatacagaacaactctgccccaaaaactatcttgcattatcctttatgatcacacctatcacccctacccactaataaccactaatctgtcctctgtcactacagttttacctatccaaggaagtaacataaatgaaattgatataatatgtaacctattaacgctggcttttttaattgagcaaaatgttgttgagattcatccaagttgttgcttttatcaatagttcattcttttttgctactgcatgtattcatggtaaggatgtatcacagttgttttagccattcacccactgagattcttcctagttttgggtaattatgaatagagatgctacaaacatgtatatgaatgttttttctgtaaacttaagttttcatttccctagggtaaatatctagacattgaatttctggtaatatgctaagtatatgcttaattttataagaaaacttctaaactgttttcctgaatagcaacattgttttgcattcccattagtaatgtctgagagttccagttgccccccatcctcatcactacttggtattgttggtatttttatttcagccattataataggtgtgttcacatctcatcattgcttacacttgcatttccctaatggctaaagatgctgatgttctttttctgagcttatttgccatccaaatatcctctttgatcatgtgtctattcaagtcttttgcccattttccagttgggtagcttgttctcttcctgttgaattttgagagttctttatatatcctggctataaagccttctgtaatatatgtgatttttaagtattctctcccattatgtagcttatcttttcattctcataatagtatctttcacagaataatagtttctaattttgacgtgtctaagtgatccatttttcttttgtgaatcatctttttggggtcatgtctaacttacctaagttcagatcagaaagattttctcctatgtgtttttatcaaagctttatagttttacacttatatctgtgatccactttgagtcaatttttgtataagacatgaagtttaggttgagctttttgttttgttttgtttcatttgcccttggatgtccaattgttccaagaccattgtagaaaagactccttctccattgaattgtctttgtacctctatcaaagcaattgaccatatttgttgtaggtctatttttggactctagtctactccattgatctatgtgtctatccctttgccaatatgacactgtcttgattactatagctttatagcaagtgttaaaatcaggtagggcgattggtgatttcttcaaatatacacttctttttcaaaattattttacctattctagttgctttgccttttcacataaattttagaaattggtttgtttatatctgcaaacagtcctgcttagattttggttggagttacattaaatctgtagagaaatctgggggtgagctggcaccattactaggatgagtcttccagtccatgaacatggtatgtcttgccatttctctaggtcctcagaatctgcatcttaacaagaatcccaggtaatttccctgtacattagagtctgggaagcacagctctagagtggaaatgacagtgaagtcatctgggaggatttacaaaatatggaagcctagacctcactcagaccaactgaataagaatctctgaagggggacctaggtgctggaattttttctatgtcttgtaggtgattctaactggcagccatgtgtgaacctctactctaaacccagtctgggctcttgtggctctggccctatgctcattaaatcaatctgattaaggccatcagttcattccttttcaaccctagatgtatattggaatcctttgaggatagaggttacttcaatgagaattttcaagaaaaaattctagttgacagattcaccaaacttcctctgaggccccacctatatttgaggattacctttccctgcccaaccccaggagctagaacaacattccagaagttttaactctcaactctaaaaacctgctctctttttggaagtctctctacaagttactgaggcaggaggagacagaggagagagggaacatgtgtgcacacaagagaaatgtccaattgaatgagtctgatcaataagatctatgactcaaaaatacttgcttcatggcaagggaacatcttttgctttcatatccatctcacatacctgctgagtcaaggaaacagctccatatttaggagaaaaatcctcttctaatctctaaatgcaatcgaaggttttctatgtctttttctgtggctccttggaaatgttaaaggcatgtctcagctacagcaaggtggggcatgacatattgccccccaaaatatgaaccaattgaatgtcgtctgaagtcagctctgtttctgttatcttttaatggattttaggtaaagaagtgttgatgtagataaaatagatataaaaccaaattcttctgctttggatgtgcaccaaccccagcaggctaaaaatagattcaactgcatcaataatatttctctttaaagttgcaggtcctttgggggtttggaaacattcagagaggataaaaggggagaaagatatgaaaacagcagaagctgcagtctaagcctccaggtgggggccttggggacagccatgctggaatgcctgatttttacatgtccaagtacctatttcctaccaaaaaaaaagcccttccacatatgataagaacacatcttttcttgcagggctgtcaagttcattctaaacacccctgccgctgcctgtttgagattgatgcctctccaatctctagctctttgtttgaaattaaacatccaaagacctttagaataaaaaaagtcaacatacaaatgaaatgcatttcaacatgcatctcaactgcagaaccacagcatgttgagactggaccaagcaaaccctgaagaagtttcccctcttgctcctctgtggtagatgacctatccaagttcacacaacaggtaacatggagcatgtggagagactcagcataggccagtgcagtagcggggtctactggaaaagacttggcctttgaagtctcattccaatcccagccttgcattgaccaactctgtgaccttgaccttgaaaaagtagagtcacagtgccctctacttcacagggttgtttggagaattactgaaaatgtgcacaaaatacctgatacacagtggggcactcagctaacaccagtcattcctgtaatccaggtctcccaacttctagtccagtgctctttgcacaacaacaccatatgaagactctgagctatccaaataagtgcacttgaaccacaggttaaatccccttcctctcatcagaaatacaggctagcaccgcccagcgttctttaaagacagccaggaaaacaaaccaaattcatactacttacccaacactgaacgagacacgctggctccctttcctttattttgtttcccttctatttgtcctgggtttgtggttctcgggcaaggtgaactctgctcagtatgatatgtgacccctggccacagttgcatatggccctgcctcagttgctgcctgctccttacttgattctccaggtccacactcctttcctgtgccatcttcccctgtggcacctgtgtgtaggaatcttcaacagctgcaccgccaacagagaagccacaagctggagccccacaagtttccccccaggccccatgcatgggtcagcagtcttgacccctgggctgattttaatattttaattaaattgacaacatgtaaaaaatctggagatttcacaacaatgcagatttctgacttcttttgacaaattacaaactggccaaatgtccacagctggccagagctgtgaggcagctgctcccttcatctggaaagactcttgctccactggtcaaagtccccaccggtcccctcattgcaacctcaccattccctatcaacctctgagttttccacccctgttatgatatgcacttccagttctccagctggacactcaagatgtgtcaccacatggcccactgcacttattcaatctcttctcctgggaaccctggaaaatctctctgcttctaggctctgctgggagcaattcccctcctacaatgtcctccttgctcttttatttatccaacccaatcaagagtatctctgcttaaaaaattcttgctgaccacccaagccacaaagagctctcctttccttaaagcatggagtcaacagttatcttacctaccttcacatagttggttcttcctgtttgcacatcctgtttccctagctaaattgtaaacttcttgagttcacatttgtttgccttccccagaaggcagccacagactttccaaagggaaagttctgaacaaagattaattgtttggtcaggagctatcaaccatatcatcactcagtgcaagaccagtctctccagcctcttttgcctccactccacttcccttgttcccctctcaaatccacccaaacccccatcctcctggaatcactccaaaaggactagaatttgtttcctgttttgcccacgattgttcccatcgctgccactccccagggctaaacacagaacctgccacataacaaaagctcagcatatgcacattaaatggaaagtgccttactttttagtccctatatcttaacatctgcagttcaccaggctgaccatgcccttctcccttttcaccaacagatctacgggtcttggaaatcccagttcagtgttcctctctcaatctttttctcttcctttactcagccaagtcactcctctctctaggcgccgcagtcctttgctcttgcctgccacagccattgccaaatgttggtgcaattgtttgcccacacctgtttttcccttggatgccaaggtcttccggatccaggattgtgtgatcttcttccatgcgcttgcctggttccccaagtcataactggacataattagtctggtggagaaggcaagtattatggccctcatttttccaatgagaaaatggaagcaaggcaccaggctccctgcatgcagcagagagatggaagaggaagagaggagcagcttgggtgagaagacttggttctattagcaggggtcaagcaatggaatggaaatgtgtcatgtcctttcaaggtcatctgtggagcaatgtttaacagcctgcccaagaaatatttaattacctagaggaaagtaagtacctttgttgacttgatatttgctaccaactaaatagccagattatgtgaagttacacattaatgtgtaggattttgcctagtagaaatacaaatgttttctgttcaggagaaaagataatctcaaagtttattaattgactcccgtgtaggacattaaccagttttgtttctaatttagcaatctcattccaacactcttcctccagtgcctatgtaaactcatgctgccatcttgttggtttcctcattaatgagctaaatgcatttttgacatgtccacattctagatttgtatgagtcacaattttaactttttgaaaattatactttgccacccaggtgccaccaactctgggagtgtgagcaagtccctccctcccctcttctggactcagtttcttcaacagtaacatgagggcgtaggtctgcatgggaaattacaagccccaggaatatttgattttaagcctgaatcttaaaaagaataatttcctcatagggttgaacatcttacggagttattttccaaaataacaacaataatgggacagtgcttcatacctggggctaagtattttaattctcacataatgagatggggctattgttcctagctctattacaggtgaggttaggaaagctgaaacagtattttttttaacgaggagacactatgtttgtccttccactcatgtttccttccattcttcttttcacctgtctggtcatccatgtttccagtcatccatcccactgatgcaaaaagaaggtggtttccattttcactctggatctatctaattgactatttaattgatgtggactttagtagaggcagtgattgcttccagttggtgggcccaggaagactgtgaaaaaggtaccactttcagcttgaccctgaaggttcaagcagaattatttagggataggttgaagaagcatctttgcctgaaggaaccatggcagggacaccagaagacaaaggagggagacatgcacagtgaccagtgggtggttatggctgtgggaagggtggataatgggagatgagatgaaaaagattgattggtcttggcatatgtcaatggctgattgagaatcttaagtttccttgatctgaagccctgtccacaatcacccagactctgagtacttcatgtggtagtaagaggcagagacaaacccttccccaggtgccctgatctggccaagcctgggcgctctgactaccagagtcctgaactcttagaagggagagctgcaaacaaccatggcgggaatctactccagcctcccttcccgaacatgtgggcctgagctaatttaagctagtctgagctcactttgcaagcagttgtcacaaggtgctacatcaaaagactcccaaggcccaaatatttaacaaccagaacactccctccatccatcagtttggtaattctatccacacaaaaaaactattggggtttcatttctggcctgctcatttcttataaacatgccagggccatttacagctcacaactcactgctctctaaacatttacacatttctccctcttaacacatccttggctatttgattaagtagtagatcacaggggatggaaggcaaggccttggcatctttgggttttctccaaacctatcttgacatgggttcaatgccagcctccccttccagtaaacacaaggattattgcactcctgggcacagacttgctgatgccttggtcttttctatcccttctcttgcagtttctttaggtaggagggaatacaaaccccaaaaacaaacagacatgagtccattttaccagctgggtttaatgggaaagctggtagggttccccatgacccctaggactgaatgagtgcccacatttcacaacaccctgattccagacaggaagcttggagaagtatctatatttgggggaaggaagctgccccagacacagcttcctggactgttagcaaaggaatctcacacaaggcctaaaccagtttccatacaacttccttgccttttgggaaggtgcaatctcacaggactggtgggacttacccaatgcagtcatccaaaaacagttatggccaacacctaagtgctgagaaaagtcaagaggaagaggaagccccaagggcagagaaagtggtgaaggtcacagaaaaggcatggagctgtggcaccattggcgggggacagctagagtccaggcacagagctaaaactgggtatgagcaagggtaggagaggggacactgctgaacacccacaatggtcctgctcctgttggctctgccttcaatctcaaaggcaattatgaataaaggaaagcacactgccttcagagtccgacctaagtttgaatcctggcatctttcccagctggccgtattacccctaggagctactcaacacttcagaacctcactttcttcttcagcaaaacagaggtgcaggtatatatctcctaggagtgacaagggaattcacgcggctgttaatgacctggtgcctgcctggggctaccaagcagccaccacaagagtcctccataatagcatccaccgcactgcagtcagggcaacagcactgcaagcacttcatggacagagaccaagcctttccaacttgatctgccatgtttcaacacagtgcctcagccattgagaaaatcctgtgacaggcacagacccccttcaagaaggacttgctgctcagctcgtgagagggttgtcagcagcttcttcagggcttgctcagttgcagagagctacctggccagaggtcatgcccttcaggggcagcccacctcctctgagtgatgggagtgatggaataaaggcccatgtcagcccatcccagcactcattccagcacaatgctggcaggccatcttggtgctcttggggctggctgtggctgcatccagcctgcatcacgactcaacctctgcacagtcctgctgccttcccctcctcccgtgggtatgagcctccagcacactcaacttcgtgtcagagcttaccttccaagaaccctacctgcaatgaacttggtatttgttgatgagtaaatgtctgaaacaagatccccaatcttctaaatccagagttaaaactcagacaggccacggtccttggtcattctaggtccaagaggctcttgctgctggcatggccaagagatacaggtaagtaaaacagtatactgtggtgctatgaccacccagggggctgccgtgtcccactcaggaaaatcaggtacctagttggcttccaaaagaggctggggaaattttaagttgaggttgggctctgtagaccttctccaccactaaagcccccaggtttatcatttcccgggagaataggtcctgggggagagggggagataacaatggaacacaccaaaagggaaccctgtaatggaacagtgcccactaatgtttattttatcccaggagtcacagaaggcctggaatggctgcgatggagataaaggatgaagggtagtcccctcagggtgttatccaaaaagtcaccttggaagaggaagaaactcctaccaatatcagaagagcaacaaacatttttttttctagaagataagtggctaatttcaaaataattattttatcaactgccacataagtttttttttttttaattcattaaaaaaaaaaaatgaggccgggcacagtggctcatgcctgtaatcccagcactttgggaggccaaggtgggtggatcacctgaggtcaggtattcaagaccagcttggtcaacatggtgaaaccccatctctactaaaaatacaaaaattagccaggagtcgtggcgcatgcctgtaatcccagctactcaggaggctgaggtgggagaatcacttgaacccaagaggcagaggttgtagtgagccgagatcgtgccactgcactccagcctgggtgacagagcaagattccctctcaaaataaataaatacatacatacatacatacatacatacatacatacataaaaatgaaatgcttcccttttcaaatgaggagtgggaacacttagattacagtgctaagttctttttgtctgtgaggtaaggagaagagcctgcgcctaggtgaccttggcctggtcagagatgctgggacagcctggacgtgggaaagaagggatctacgcaggtctgtccacagcacattccagggcagcttcctcccgggctgcttctgtgccagaacctgctggcctcaggagccccagctcacctttcactgaccttcagcccacaggagaacagcatttcctacctcccccacctgctgacaaggcctctctctttcccacgccaaggacaaagatgacctctgggggattccttttagctggctcataaaaggaagagagatgggccaaagagaaagagctgctgggtccttccccaactagaacatgggaaatgatgattttccagtagggaagtggtggccaggcaggcaggcgtcgactagatgggtccctctggggtgtggtggaaatgacctcaacttcaaagagacagacttccagagaaggctggcattagcatcctgatctgctctactgagaatcccaagggttttgcggaactcttgctgggccatgaggatacagtctcctcctgaccccaatcctctaaccaaagcagctaggtttcagttagtgtacacagagctccaggcctctaagagtgtgaaagccactgcctcaggagatatcccttgctggagatcctgggaagtagaggctatggaggcagaccacttaatagctgtgcaaccctcagcaagtcattcatccactctgagcccgagttccctcctgtgtaaaacagcagttatcacagtgcctagctcctagtctgggtgtgagagttcaaggtgaggccaaccagttgcttcactccgtgcctggctcatagtgagacctcagtaaatgtgagctattttctttcaatgaatatttgccctttccagcatcacaaatacatgagcttccaattctagggatacaaagacagaggggctttatttctttcaatgagttcagagaagtccctagcacttaaactgctatacactgagagagtaagccatagttctgaaaatgctctgtgtgctcattcacctgaagcagcactgggggtcactgcagcctcaggtgccaccgagccgacaggccatgaaaagaacacccactgactcactcatctgggtggaatggtttcatggggacccaggtgaggtggtgaggttgctgcttttttatgtattggctttttctgcctccccaatgccccacttccgtcgcaaaagtgtctgagttctggagcaaaggctcagctaggaaaagtttcagatattttctttgtcttaacccttcagggagaggaaggaaaatctgtctcttgccagggtgagggccaccaagcgggttagctcactctgccacattctgcattttctaccttcaacacaatggacagtgggatgtctctctcttgccatatgcattcaagagaaaagccctggtttgggtggggctctggtttgggtggggtttgcattgggtctacagccactagcaacttgctgtagtcaaggcaaatgacataagctctctgatcctcagcttcctcattgtaaagagagctcttagctccaggtctcattactttcagggtatttaggatgtttagatgccaaataagacagcagaaggcagagcaccttgacaagcataaagcactgtatgcaaacataaagcatggtgcaatctcacaggactggtgggacttacccaattataaacaaatttataatcacatggcaggaagggtggaatttcaagatagaattattattcattgtaagatgacttgtgtaatattgtaaatgactgctcttcaccccatcctctgattcaaattaaaatcctcattccatggcccctacatgtacgctcattttcactgttcagttacaagcaacaagatgagacattttgacgcccttggtaattgtctggtttctagaagttcttggttcacaggcctaagcatgtttcatttgatgtttggcaccatagaaaacagtgtatgtttaatgatttctgtgttaaactgaataatgaataaccaggaaagacaacagaccaaatagcaacttcttgatacacctgcttgacggaattctgagcctttttcccactctatcaaggacaactgcctaatggagagtcagaatatttttctaatacaaataaagtaaaaaagcaatgtaatgttattatcttttaaagacagaaatactattaaatcctcaaccatttttaaattaaagcataaaaccctcttctacccaataagcaataagaactcacttgaattccttttcacaggcatttaagggatactaatgggtacagacagaagagggaaaagtacagaaaggaaaacagcagataaatatatagaagcagaaaacaagagtaacagaagagaagcagaagagactaaggaaggcatctaggatgcagttgtgaagagaaaatcagacatatgtaggcagaaaagaaaacaatcaaacaaacaacaataataaaattagaactaaagagaaactttcttaaaggaacccataattttggaagcttatcagtagattttaaaagtagactacagatttatgactacaggagtaaagggtgtgttactcttagtaattgtttccttaatgacataaaatcacatcaagactatatccagctcatgggccagcagctccccatccctgccccataatgctgcactgtattatgtttcaatacaaaacatttggtgtccacttgggtcagcacctccatcagactgccatcactaagggaactgagccagcctcccacgtcagtttcctcccctatgggctccactgaatggggatgaatgcggtacctactctcatagtagggatatgaggattaatgaggtgatgtagaaaaatcacctggtattgtaggtggcatttagtaaatccttcataaacactagtgttcattattagttggggttacaaatagttactctcagagggggaaaaatgaatgaaagtgtgtgaacaggttaaacaaaatattttggaaattttatgttgtcgtctgaaagttctttcatgtgcatctaaaggcatcacactcactgtcaccctcttcacatggtgggtatcaatataaagaacattcttcaatttctgcttgactgctacatctcatttctgtctctaggtttccactgagccctccagctcaaggggcctccctccgcatgagtcgtctttaggaagcccagcctggtctctaattttgagaagcatttcccttatttcaggtcttcattcagccagtggttcaaccactgaaccacttcagtttccttccttcattttattcacaaaggaatcctttcatctacagcccctagctgggctcctttgaagagactttctcttcttgcattattttcttggtcagccttccttaggaaggaattaagacacatttcaggaaacgggcagaaaatgttaatccttctctccctcattgtcctactcataaacgcttactccctcaaatgcacccataaataagctgtagatccacatctggttctgagcccagcacatagtaggagctcagatgaatgatcacgcctgacttctcagccttgcttctgccatcccttcccctgaaaaatctgctcctctctacttaacctagtagaaccctcatgaaagctgttgtccctgttgaaggaatgatgccccaagcatccagcgtgtctgctgtttacttcatgcaccttagtggatgtggtgaaatgaaatgacttttccatttccaaagagaaagtgcaaagtctccaaacttatgacctctttctcagaatgccaatatttacagcttagccctgggcaaccctgtgcttttctgaccttagattcccatttggagtggaaatggcttttctatttctccccaaggttctctgaattagatgaccaaaggagaacttacttctaccaagatgggtctatgagacccattcaggctctcatccattcgttcaacagattcattcattcagcccctactgtgttccaggaaataagtgtcaaccatacaggagtgacccagacaaaaagccctgcttttatggagttagtttggattttagtggagacaggggaagatagatgataagtaaaataaataaagtatatatagtatattagagaattataaggtttataaagaaaaaatgaaagatacaattagtagggaatggggataatttaaaatagggggaaatttataaacataatggaaaatatgcatgtaagtaaaattccttccaaaaaatggaatatttaacactaacttgcggtgtaaacatgaacacatcatgggctccctccaggcctcggtttccttctcggcagtataaggtggaactacaaggtatctctatggtagcttctggcactgaaattctctttctctacccaatagatagcaatttgaattaacactagagcctgttgggacccagtgattgtggtctaagtttcaatgactttttttttaaatccctacattccttggggttcccagcaatgtctccagtgggctgctggtccaaattaattgtgagagcaaccacaaattcccttgtttatatttttgaattgttgacttagaatcagttttaaatctgagcccttcttccccacagatactctcaaaacagcctcctgataggcactaacccctaagaaggtcatcaagtggggctctgagagcaaggatgctgggcaacccggcttccaatgccacttatcctagccacatgagtactcataacaggcttgacgtcaattaaatcatactggccctgagaggcgccacccaacaaactgtttcttcttcgtggactttttgttccctctttatttattttccactgagctacaacaaggctcaggaggaggcccttcatctaggaagagtcatcttgggaccatctagggaggaaaaggcatccatcaggcactcatcagccacctctgatgaaaagcttcctttggggtaatttctctgcaccaccgagtaagccttctgcctgctggaggagctgtggtgagcatgtgaagggaggttctgaaggcttcagcagcagccaccagtccccctgcagcccctaatgagaggtgatccttgttcaactcctgctatgtgctagacacattctaagcactttacatgtattaactaacaagtctatgaaacaggtgttatcattattcccattttacagatgaagcaagtgagacacagtgaagcagcttgtccaagatgacagtttgtaattggaggagaagagcccctatcagcatcgctgtccagaagaaacataagacaaaccacacaggtcattctaaattttctagaaggcacatttctttgacacttattttatttacaactctatgcaaatttaaagacaaataatattccaagtggggccgggcatggtggctcatacctgtaatcccagcactttgggaggccaaggcgggtggatcacctgaggtcaggagtttgagaacagcttggccaacatggtaaaaccctgtctctactaaaaatacaaaaattagctcggtgtggtggtgggtgcctgtaatcccagctactcaggagcctgaggcaggagaatcacttgaacccagaaggtggaggttgcagtaagccgagatcacaccattgcattccagcctgggagacaagagcaaagctccgtctcaaaaaaaaaaaaaaaaaaaaatatatatatatatatatacacacacacacacacatacatatatatacatatatacacatatacatatatatacgtgtgtgtgtgtgtgtgtgtgtgtgtgtgtgtgtgtatatatatatatatatatatatatatatatatattccaagtggaggaaagaagttttcagattgctctcacttgtaactcccatacattaattttcttgtacatttttctttaagattataatgttgattgcctcctaacagtcatttccatccccctccctcattcagagaaccctgattttgttcaggggtgcaggtacctcaccaaaactgatgctggccccactcctgggcagacctcgattagtctgagcaagccctggtgctctcattcttatgccaacaattggcttaggaccgacctgtgactggttcttgacctgtgaaataaatgtgcaggtgtgctgggggcttctagaaatgtgggccagactgctgaagaagaggcctggagagatggttgcttaacctcgagatttttttttttttttgctttctttttagtatgataaaatatacataagataaaatttaccatttaagtaatttttaagtatacagctcagtggtattaagtacattcacatggtcgctcagccatcaccattatccatctagaaagcatattttttaaaagtaaaaagaaaaaagtgaaattaattttaataatggagtttaatctatacaaaatattatcaataagtaatcaatataaacattataataaggtttttttacagtctttttttgtactaaatttccacttacagcattgttgcttttttagagacagggtctctctggagtgcactggcatgatcatagctcactgcacagtccttgaactcctggcctcaagcgattctcctgcctcacctccaaagtagttgggactacaggtgtgcactactactcccagctttacagcacacagcaattcatatttcagatgctcactgaccaccggtgttggactgcccaggtttaaagtttctcaggcttgtgcgtgctcagccagctcatgggcatctccaagggacagcagcatgctgtatgtttatgaaagatttgtgcgtcaccatcagctctctggggcagtttgcgattcaccgcaggaccctagatggtgtctgactctaatggttctagatcagcctctctaacccccgcggagatcactggcatcacgctgatggacaatacaagatctgaagcctaaatgagagcttttcctggtggagcaaataccgtgcctccatcacccagctgtgatttcatctcccagttgagaacatgacctcaatggcagaggtagggacaacacctatgcagctgcacaggcactcccaggttggaccaataataaataaacacattcctacttggaaagagggcagcatgtgtgcagggttgaggcaagccgtggttgccatggaaaccagccagcatcactccagactttttccctggtgctcggatcattggtggctgacgaagcccagtggagaggcattgttcctgtacttatggaaaccttccaaataggcccattatgatgaaagcacatcaaagagggaatgatgacgtacctttaccatccatcgtcacatccactgtttgtcctgggtaatacccaaaagagaagaaaataaagccactcttgccacagagggaaataactggagagcactgaggtatgacactaggggtagcaaggtggtccccaaaggggaggcaatgaaactgccccatctcaccaccatagtgaatgctcgactggacaaatggttatggcttcagggatttgctacctgcccaagctgacttacaactcactttctatggcaagcctctggtttgctctctttctggagccacgtatgtttgagatcttcccattcattcattctttcctatgcccattcattccttcactcattcttgaatgagaagcaccatggtaacatgaaaacagcctgggtcatcgagtcatgagatcccagatttaaatctcagttcagatgcttattggatgtgtgatctcacctaagctattaaagattctctgagccttggttttctcacctgtaacatggggacaagagaagaataatgtttgccacttgtcttctacacagtcatactcaatgtgtttatacatgatttatatctcattccattttgatcaacaattacccaacagagagcctggtctctccagatactcaataagattattgaattattgattattgaataaaaatatgacaatgtgctttcacatatatttcttctctctctctctcttcaaatttcattttcacagcaatctggttcaaggttgtttcagcccagcacaggacaaagaggattataaaattaaaccacatgtttctgactctcagtgaacttacagtttactatgttttattaacaatgtatacaacacttagtctgccccagctactgtactaagtactttataaatattaggtcatgtaatctgcataataaccctatgaggtaagtactacgattgtcttctgtcactggctcagggtcacactagtacatggcagaacaaaggtcaaactcagccagtctggctctatagcctgtgctcttaaccactcagcctcattgcctttagagtggataagtcacattcacaagtgtatgcgaatactctccaagactgatggattcagaggaggaaacactatgcactgcatcttaaagatgaggtaggatttgaacacatggagtgcatggaggagagcagaagaaggacaggttggaaagaggataggggccctgaccatttgcttgaagtgtttgggctttagaccttggaaagccactgaaggtctctgagccatggggaaacctaagcaaagctggctttggggaaaattcatctggcaatagcatgaaagatggactgaagcggggagatgggacaaatgaggagagtgacatgtagctgctataatgagtgaaggaaggggtcacagggcttaagccaggacaatggaaaaagaagcatcaagggcaaatccataggacgtgcctcctaccaggatgtaatatgtctccccgagtttcccaccaaaactttcacatcagaaacaagttccaaggagcactcactgggcactttcgtggccatccagagtggcacatgggtgctctatagcactgctttcctcaaaggaaacatggggtcatcttgagcagctggaaacactggctgagcctttcctagttgcatgcagccatttactgaggccaagggggcaaaatctaatcctgacaaagaatcctggccacctcaaatgcaaaagatagccaagtacaacgaaccatagtcccgtttgttataatgtcctataaatcacagcctaggccttacagttaatagggctttctattccaattcccattatgctggaaggggaagaggaagaattgaggaacgaatgaggagtctgagagtgagttacggcccaagaatatgacttgtcagccgtcttccaagctctaccaattgcctgaaattctctatccagtcgtaggtttgcataaattcctggagaaggctttgtctgataccacagtgaaacagatgccagggtgcaggcacaacaggtagactcataaaactggtaaagagaactttgctttgacaaaagctggagttttccttgttatttatctttcctatttgaagccttgaaatcccattttcatcttgatggagatgataaactcttagaaaacttttatggctcccaggatgaaactgaggactctgcctctgctccccactgcaattctggcaggcttttaaattcaagtcagggcagaaactgtttttggtcagaggcaaaatgtatttatctctgtaagcacagccattaagatgtgagcatgaatagctaagagaaagaacattaagggagaaacaggaagaaatagaaggtgaggctatgatggaaggaaatgatgacgcatcaacccccaccaaaagctttttacagtgccgggggagtggggcacagggaaaggcatctgcagcgattgggagaaagaacccgggagtgggctgaggggaaggctttgcagtgggagggctgtgatcagcgtgtgcttcatgcaaagagaattttgagagtggacataacaaacaggaaaattgtgcttgcatttctgtttgtctgtagaatcactgtggctctgaaatccaccccctctgctctccaaacactaaagaaagtctccagatggaaaaatctgaagtcaggctgcaatatgaaaaaagaaaagaaaaagaaggctgctacaggaagctgacaaatttgctgtttctctgaggtctaacctatgcagctggggtatcaaatactagacagggtcaggagacatgtctgaaactgaccaaatgaccttggacaagccccactttaatcacacataatgtaaactttagggaatgtgacctagaacaggtagctaaggcacaaataacactagtactaccaccctccaagctggcactcatggcaggcatcattagtcagtcatggaattgttcttttcttttcttttcttttcttttctttttcttttcttttcttttttttcttttctcttttcttttcttttcttttctttcttttcttttcttttcttttctttttagatggaatcttgctctgtcacccaggttggagtccagtagcgtgatctcggctcactgcaacctctcactcccaggttcaagtgattctcctgcctcagcctcccaagtagctgagactacaggtgcctgccagcatgctcagctaatttttacatttttagttgagacagggttttagcatgttggccaggctggtcttaaactcctgacctcaagtgatccacctgccttggcctcccaaagtgctgggattacagacgtgagccactgcacccagccctcggaattctttagagcagagccattatgactgtttgctgctgaaccttaaatctttggccaaatattctctgtagctgctactgatcaatcagaatgaacccagaagatgaaagctgatgaaagatgatgaaagttcaccattgctagacttgatctcttctaatccttaaacactagagccagataagattgcatgtcatgtgtaatctcattatagacatccttaactaagtcctaccttggttttcttttctctttggccttctttccaagtcttagcagccaaggctgtgaaataagaactggtatgaaggctcttcattcaactccacatctgaagctctgaaagtgaccttgtgcacttttcttgagcctctttactttacgttcccccattctgccacaaagctcctggtggggctggtgtctcctctactctcctgctgatttcatcaaggtaaagaattctattccttttcaaatgctttgagatcatgggatagaagacagcctggggaagttcaaagacgtttaatcattagcctcagttcttttgaaaattattaaagagcccagaattagaaattcagatttcctccaaatccctgagaacaaacaactctcttgtaaatggcttaatgtgtctgtttaatgtacacaaaattatctttcaggaaagtggattgttttttatatcattttgcatctctaaaatataccacctatggcaaaaggattgggattcaaagtctgacaaaatctacagcagaaataattagcaccagaggctgtttctgagagttaaatgaaagagaaactggttatttatttatttcttttctctctatctgtatctctccatctcagccccgggaagaggaattgtatctcttggtgctagaagggtggcttgctgaattgcctttacaaggtttttttctgtaagacaacaactgagcccccaacacacaactccctgtgggccgcagtgctatggaaacagctgcagtgctccaactctggggaaaacaaccagataaacccactggtttgcaaactaggcacaagggcagaggaatagtgatgttttctaatttagcatccagggaggcaagggggagtctttgcttaaatcatgttaatgaaattggaaacacttgaaatagcccattgagggtctgttgcccctgttttttaaagttcatctaaaagttaacctacaaggaattttcatttggggaatttctgcaatgtcaactccactgatcacccacagtgtttaacacccttgctataaatttgggggctagcttggcagctcctgccacccccctgagtctgctaccttgctccagaaataaaaaatgactttggccacagtaatgtttcctcgatcctcagcccctcctgggggcctccggcagtcattattttaaataaacatgccttttattgttttcaggtacacagagatggaggcgcttctacctctggaggagggatggactttcaggggccccatgatttgcagcagttcagtcaaaagcaatacaaagagcaaaggataggggctgttatctcacccaagagctcctcaagcagaggatactcaattggaaaggaggctcttccagtcaaatttggggctagtggggtcaccacgtttgataccaactaggaacaacatccccttagaggcttccaactgaggaaggttccaaaagagagctccatggctgaaatgattcaaaagaagccaactccttctcattgagctggccctttggaatatggccccctcctcccacggcatccttccccctgcccagtgcctcaggcccatctacatgcttctacctataggctttgcttcttctctagaaaggagcaaagaaggaaaagaatcattggaggtgagtcaaaagcaggcaccgtaactcacggggccttgtaagccagggacacagtttcagattttacttcaaatggaggcaaaaccatgggagagccatgcagagacaccccttgatgaactctgcttcacgccaatcactctggcagctaagaaaagtgcattctctctccttttgcagttctcctggtgcctagcacagggccaagggcacagtagatgtgagcctaacacttgtggcctttgctgatgaaggacagtgaaggggataagaaaacataaagatattttgggctgcaagggaacgaactactgaaaaactactgcggccccctctatttatggagatgctgaggccttggagagggaattgacttgtccaaggtcaaccagaaaagtgatagcaaagccagggttagtatccaggtttctgctgattgcagctcctcagataaaagtaagtgacttgcctctcttctcccatatccagaattgatctcaaacactgtcatgaatccccaagggccagagagacacacagcatagaccaaggtgagtaaactgttttctctctttctgatgatctgagctttttcctggagagatctcaggtggccaagaaaccaagttgcccacctcatggttcagaggaaacaataacctcctggcagcttccctgggagcccatgcaggtgcctcagggattaaggagctcctgaaaacaactcctttcctttgcaggaagtgattttccacccctgaggcataacaccaggcagaggctctatcagtgcctgctgatataattagctctggacagactctccaaccaaggcagacacaaccaggcccttgctctagaaacaaaaagaatgttctggacctatcccagtacacttccaaaccccacgccttcctgggcaagtcggggctcagagaccaacaaacccaacagacttcagcagcagccagggagctggcagcctctgtcccctgaaatgccacttttttttttgtgattcagcctctgtttcaagctatttttagtgtaagcaaaggctgcatctgagggaaggtggtgtgggaaaggggtctttactttctctctccttttcaatgaactgtcctgtttcccttaggacagccatttcaccaaaagccacaaaacatgtggggagggaggattaaaaagaaaaatgggaaaaaggtcaaaattcagcctgtttgctaaaagtctgggaacagttctaggaaggtgatagtttctcgatcctttgcgttaacctgctgaatcctgggctgctcctgccagtggggaaccaatatgcccagtccatctaccttccgaattaaccaacctccagtaaacaaggaaggcccagaagtttgctctcccagggacgtggtgcaaacaggtttaatggtcccccttgatgccccagggaaggatgtgtgcccttggaggcttgtgaacagagaagcaagcttccgctcacagaggaccctggcttcccaccctcaccccgtctccatcatgtcagcacaaggccaattttacaaactgaaattaactggatgagcaaaaagatagccttggtgcttaagaggcttgggtacatttaattgagtttccaagtgccctgattccttaagaaagccagagaagccactgttatgtcctagatccctcactactcaaacaggagagaatagtttttacaataaaaattttagggcaaatggtggctttctgttgttgtcatttccctgaagtaggttttttgtttgtttgtttgtttgtttgtttgtttgtttttttctggaaaaagcctcactctggacccagagtctaaaaatgaggcttttagtgcaccaaattgggctgtttggggcccgtaggcacgagtcagtctgcctcctcctaaacatagcctcgtaaactaaacttggaagcatcagcttgcgtgtggtcccgagtgtgactttccaagcatgcactcccctgcaacgacaaaggctgatgactttgtcatcatcatctctatttttgagtctccctgctaaacaaactttctcgcagctgaaatggaggctctaaggatatttttctgacaaaaacggagtgctaagccatcagcaccctctgaaggccttgggggaaaacctgggtaagaaaagtctcccagcccaactcagtagccgcaaatacagacatttcatttcctgaaatgcctccagggggcgccagctttcatgggttgggaaggagggagggaaggacggaggaatggaatgaggcgaggaaggaagggagggagggaggaagggagggagggaggagggaggagtgggggaggtgggagggggcagtggggaggaaggaaggaagggagagagggaaagaaggaagggagagagggaagggaagggagggaaaggaagggagggaagggaaggaaggtaagggaggcaagggagggaagggagggaggcagggagggaaaccaactactcacatatttgcccaggcccctgggattcagctgcagaactgcacaggatgtgcaatcaggactagaatgtctgagctcccaggcctgtccaagggactgagagatgggtcacaggttctgacttatcactaaaccctacttcagaaaccttgccaccccaaatcattctagaaaatgcaagcataacatttccaccttcaacactttggatgactgcactttgcagcttttgctgaatgaaccaacatatgtccagcacattgaacagtatctgaccccgagcaggtgctccagaatgtttgaaggaatggatgaagggatggaggaatagctcagaggagctgcctcgcatgtgcagtagaatctgggtctttatcttctggtgacctcacacgctttcccatctcctttcaatgaatgtgtggtcactacctgtcaaaatgtacatcaaacccacctccccaaatactggtgcagatgtgccctccgaaaccagcctgtccctgccctgtcagcctcgccccacctccagggagaagtggatacggagaccacagtaagtgcacttgaccctttttccttaagactcatctgttgtcctgccaaggcatttcctgtgacacatgcgcccacaacgtacagctccagggagagcccagcccgttctccagtccccagccagctcagggaggctatatgaagtgagaatttcctggccaatttgacaatggtgagtcaggctggcatgagccagctgcaaagaggacgcagcctggacaagcctgaattaagtgtgtgcacagagcaaacatcatcatctggatggatccaaaccagggcttgcctggggcattcagagcctttcagatggccctgcccagagctgctcagcactcttggaagatgtctgggtttggggaggctcaagggctgttcttctacccctgccccagaaaaggatttgttcttcaccccctgacccgtctgtctccataccagcccatttcctccatgacatggtgaccgggctcacacacacaataacaaaaataataataaccatgcttatcaagcactaaccatgtcagaggcactgttctaaatattttacatgcattaactcattaagaggcagggactattattgtccccattttgtagatgaggaaactgaggtatgagacaatgaagccactcgcccagggtaaaagccaagcccctgagacagatggagctgggagtcaggagtctgcagaggctgggcttccaactgcccagccgcaccacacacagcagctccttcccaagatgggtgtcccagggagagaggcaatgcaagagctgaagtgagttttgaggctgctatgggctccacccatcctccttgtttgttccaatcaagtgagaacgagacacaaggagcaagatggagatcaaaaaagagtaggagctctagttcagatcatgatgcactgacaaaggggcagggtttctcactcccaggccccaacagagactgaagcaaagcggacagagacaagacaggaccggcagaagcaggccggactggctgctgactgcacagaggctgcaagtgctctgcttgcttaccaggcccccactgacctgtgctacgctcagttctgtatactagggaacaccaatcaatgtcggtggatcacacaggtggatgaatggacatagatggatgggcagacagacaatgggatggaaggccaaagcaggcacccacatgcacctggaaacttcagaggagagggaaaacagccatgccagcacttgccatcagagccctgagggcctgggagccagagatgagtggccaggatcaagtgggctgtccctggaccaggaggctcttcctcactctggagccaactgagggttgatttctgaaactctccttcattttcacagcagccctggggagggcagaggagccaacacaccagctagtaaaattaacagctgctctttacagggcgtgccggagagcccagcacatggctcgaggcctgcagaccagaagctgctgcgagctgaggtgcctggcctgcaggccctgatcaggggtcctcttgggggtaaggcttagactctgagctgccagcagggcctggggtgtgggggctgccgaagcagtgggcaggtggatggagaaactcaaggaatgatgctgctacaaaattctcagacatattctcctgaccttgcgaagtggaaatccatatgttcaccccagctgggaatctgctatggaacttggggacccacctggctctggcctctccatctctaatgcagtacttagttgagcttggggaagtgaatgtagacacgtccccatgagaaggggacagatgttatatcttatctattacctatgccataggtaacttatggagcaagtcctgtaggccacttgaagaggaatattgacaggcatacagggagtggcaattgtttctttacagggacagatggtaattattttaggctggtgggtgttttggactccggatactactcaactctgcctttgtagcttcttacagaagcagccacagacgatacgtaaatgagtgagcatggctgtattccaatgcaactttgtttatggacgctgaaatttgaatttcatatagctttcacatgtcacaaaatacacttattttgatttttaaaaaataaccatttaggccaggtatggtggctcacatctgtaatcccagcactttgggaggtcaaggtgagaggattgcctgggcccaggggttcaagaccaacctgggcaacacagtagaaccccatcagtacaaaaaatttaagaaaacatagcatgtcatggtggcctgcacctgtaatcccagctatcagggaggctgaggcagaaggatcgcttgaacccaggagtttgaggttgcagggagctatgattgcaccaatgcactccagcctgagcaatagagtgaaaccttgtctctgaaaaaaaaataaaaaaatgtaaaaaccatccttagcttatgaaccacacaaaagaggcaatgagccagactgtcccacaggctataactaactgatccctgggctaattaaatgtttcccaaagtgagtgctatgtgatgcccacaggtattacatggggaaaggattccacagggaaatgaaaatggaaaatgctgggcaaaacagagcctttccgctttctgactgcaggacttctgtaagtatttatatgctgatatgcattggcaatctcgaggagggggatgagaaatgaagtctatccaagttcccagggaaccatttttatccgggaacaattcgtgggtctagtgttctatggaacctaattaaagccatgaggataaagtctaaccaactgtcagcaacagcactatgaaatgcgatcctgctgctctttgaatatttctagtaacaggcagctcactacctgtcgggggagactgctcaattcaattatttctctgactcatgttttctcatctgggtaaatgatgttgagtcaaaaataacaaatctagtgcaaatctagtgtatctttcattagataaagacaaaatttcatgtttaatagtaaaaaaagaatgtatcttctttgactttttgactgatacccataatgtgatttcagtatctatgcatgggatgaaatacagaaccactattaagtcctggaaggaaattatcatatggttcctttaaacagaagcctcccttaggagtgttaaaacaatgccaataaaactccaactgattcccaatagcagagagcaggacatacctattcactatgggacattcttactaaaagtacagtcctgtgaaacctctagtctttctgctacacaaggcattggccaatgatgtaagaattttacatagatttgcctaaaatataataaaagctggggcatagatgaggggggtgagagacagagacagagacagagagagagagaagtgtgtgtgaatttgccaccaggcaccactgagaaagaaaagtagaggatactgatgggaaatgtcacaacctccatagggcacctaacagaagtgaatgcaatgaatgtgatatatttgattatgtgtgtgcccatgtgtactcccactgggttcaaccagtctaatttcatgcgcaaacagcacatcagtgaatgtacatctatttaactctgttaaaccaataggattattcctatttgaaaggcatatttgacacatattttcttttgggcccttggagataaagatgaaatggtccaggctatgtatataacgttaatgtaaaatgccacacatgcaacatatttagggggataaagagagaggctgatatttttctttcttcttacatcgataaatcatccctatacattcaagcaagtagcatatgctttcagttcatagaattagctgtgtaagcttcctggagcaatacacagatgtaacagcataggaatatggggaaagtaactacaaagagtgattctaagggctctctctagctttgctcaggagctggtagctattttggcaagaccagtctttgaagagacacacaaaacattgaatctgtcagggggttgaggtaaagtctaggcagtgtagatgtcgctcccaagttgaggtgaggctgtccttcaccacaggacatagtttccctagggagacagttgctgtgagatcaacatggaaatgaatatgaacatgcagaaactaagtgacaatgtggatagtgagagtatgtgtgtgtgcctgtatttatctttgtgtgtgtatcactgagtctgtaacgctcctttacaaagagtgtgacactcttgctactcgaccttagagaatctcttcgcctccagccccagactttcaatttctttatatataaaacaaggggataaattagactgagtcagcaaactatggtgtgtgaaacaaatctggcccaccacctgtttctttttttaaaacgttgtattgacatataatagtgtacatattttgggggatgcatgtgatattttggtacatgtataatgattagatcagggtaacagaaaaccatcacctcaaacatttatctttgtgttgggaacattctaattcttttctagctattttgagatgtacaataaattactgttaactataatctccctattgtactatcacatgctggaacttattccttccagtcaactgttttctctaccccctatttctataaatacagtttatttgtataaatgtaaggagtatgagtgcagttttgtcacatggatattttgcacagtggtgaagtctgggcttttagtgtaaccgtcatccaaatagcgtgcattgcaaccattaagtaatttctcatcactcatcgccacctcccacccttccaccattctgagtctccattgactactattccactctctgtccatgtgtacacactatttagctcccacttattcatgagaacatgtggtatttgacttcgtttctgagttgttccacttaagataatggtgtctagttccatccatgttgctgcaaaagacatgatttcattcttttttatggctgaatagtatcttattgtgtgtgtttgtatatatataaatgtaatatatatacatatataatgtgatatatatgcatgtgtgtgtatatatgtgtgtatgtgtgtgtgtgtgtgtgtattttttttttctttatttaatcatccactgatggacccttgggttgattccatagctttgctattgtgagtagtgttgtgataaacataggagttcaggtatctttcttatataatgatttcttttcctatgggtagccaccaattagtagaaatgctggatcaaatggaagttctgttttcacttctttgagaaatttctgtgctgtttttcatagaggttgtactaatttacatctccatataagtgatccttttctccacatcctcaccaacatctgttattttttgtctttttaataatagccattctggctgctgtgagatgatatctaattgtggttttaatttgcatgtctctgaagactagagatgttgagtattttttcatatgcttgttggccattcgtatgtcttcttttgaaaaatgactattcatatcttttgcccacttttaaatgttatttggtgatttttgttgttgagttttttaagttcctcatgaattctggacatcaggccattgttgaatgcattgtttgcaaatattttctcccattctataaagaaagtttactggaacaaagtcacaccaaggctgtttgtggctgctttcaaactactgtggcagagttgagtcgtggagcccacatggtctgcaagcctagaatatttactatctggccttttatggaaaaacttaccaaccctgaatttgactaccactgttgactttggcttatgattctatacagcacaaccaaactatactaaaacctacaccatacgtttcttgccctctttatttagaaaccaccttattcttagggggatttaatttacctgacaaaaatgtatggaacacataactgcatacatgtaaattccaaataggagtaagaaaagtagggcaaagggaaaatgagaggagagatgatgaagacaagccagagcaggggtgcaaagacacagagcgcaaacctgagccactctgtattttccataagccaccgacttggctctgagcagccaccactgagagacatgatccctttctcgatttagcatgctcactggatgttcaccaggaaaaccacaacaatctctggtgcaaaacactacttatcccatgagtctgtgcataaagcaggtaacatgagatgcagtgaacaaagtcctcaatgacacccaaacagttaagagaaatcctgacgacattgactgctatatccaaatttccctccgcatgagccgactccaaatcccacagtggaatttatcagcacgtcttccagcacatttcaatttttttaaaaaaagcaaacatatattacttttataatcagaaaataaacatttgtttagttaagaaaaaaataaaaggaagcagtactcttgacagcctggtgttcactttaatgtagaatccctcagccacgtgctccaagagaaggctctgtccagtcctgctgtttttggccagttgagcctgagtgccagggtgagagaggaggcaaagacaggctattctgagatctggagccggggggtcaaggaatttttatcatgtggataatcaggctccaggcgttgactataaaaagcactggtgaatggcaattatcatttgtcatttcttaaattgagctctgcatccttatatctagtttatcaatataaataattcacacctggatctctgttgctcactgctttatgcccagtgccttgaacagtgccaggtacagatgagcagtaaacacttagtgaataacggatgtgctcgtctgggagatcctacagatattctgaggttgtattggcaaattcttccccagctggaccttactcatgatgtcccagcttcgagattcacacctgtgacaattagacaggtgagatagaggcccagatgaggaggccaagctcctgagcgtgcatcaaggaaaacaaattaaaaattgaaacgggaaactgaatagccagctgtctggtcttgctttggtcccattgttgcagggataaacatttggacggctcaagacaaacacagctttgggttctgaacaggcagtgctgctttctcttgcccgccattacttaattgtgaaatctcttctttgttcagtgcagggacctgcctgctcctaaagggcaggcctattctcaggataccgcctggagctctgagatgcctgctttctgtgcagcaggtcccacttgctctgcatggccccaacagcctgggcaggattttctccaaggagaccttcagagagcagctggcaccttgggcaggctcaggcaaagaggcctgagtggaccatgcttctacatgcaaatgtttaacaagcaggccaagcatcctcaggaccaaattggctaaaagatggtaatgtcaaaatgtcacagccaaagtgacagctgtcagtggcttagaaaagaaaaggcattatcttcgactgggaagtaatgacacaaaaggagcaccagactgggagacagggagctggcaggtactagcctggctctgtcactcaaagctgaatgtttttagacaaataattgcccttgctatatcttgattttctcaactgtaaaacagagatgaattcactgataagattggcctgttttcttgtaatgaacccctacaacacaacagcaataaggagatacggaagaaatacgacattgtccttccccttcaaactgatcataacatataaggttagcacagtgcctggatcacaagaggcgttcaacagtgtgattgccaggagagtctcaaggtggccgctgggtgtgctgggcccaatgagttccatttccatgatatcacccacatgggctacctgcatcttctgcttggtgtcagtgcagaccgtgccccaccaggaccacatcaggaatctgctcccatgccatcactaaagcagtagcttactgccctaacttgtcctatagcctccaagctctagcctcacccattcagtctccacttgtcccccagctctctctgtacaacaccccctgcctcaaaatctccttgttctacaaacttcaaaaattcatttttttttttttgagacggagtcttgctctgtcacccaggctggaatgcagtggggcgatctcagcagagccgctcactgcaagttccgcctcctgggtccgtgccattatcctgcctcagcctctcgagtagctgggactacaggcacccgccaccacactggctaattttttgtatttttagtagagatggggtttcactgtgttagccaggatggtctcgatctccggacctcgtgatccacccacctgagcctcccaaagtgctgggattacaggtgtaagccaccacgcctggccccaaaattctttagcatggcctttaaagccccaccaggctgtctccaggacacttccccagactttggggtctgcaccccccatttcccagagcgccaggctccttctctgtttttcctgctcctcactttgaaggctttcttctcctttaactctcaagatcctaactcacacttaaaagctcactgcaaatgcattctgtcttattaagtattcttcacaaattccagcccacctagtggtcattttcttgtgtttaagcctggatatgtttttattttttatatcttcccgccataaagcagctcatcttgaaatgggagttttagttcaaagactttcctccctatgaaagcttttctgatcagccctactttcccctacagcccctccccacactccacaagtgcacaccgtgtttgtactcatagcacttatcctccatgcattccttcaataacttccgcatatggtgcaatagaatcaggatccttccttgttttctccagagctgaaacaaatacacttggcccagaattagtgttcagtaactcttgcaatgctgatgaagaaaattagaactgtctataatggccacatggaaggaacaagtgtcacatttgtgcagctaaactgtctgctgctccccattcactatcaccaccatacatatagaatacactacctccattttgtccccatgaatacccagactcagaattcaacctctcttaagtttccaatgcagaatccactcctcttcaagcatgaaagagcaatggagacttcagtcaagaggcaggaggagagatagaggtgctgttacacagctcagccaacagcaagtcacctccaagtccccactagacactgtccctcctgggtcacaccagactgaattgtctccctctctgccttcctccaagcagccactgacctcaccagtttctctctcctcctccaaaactccaactttaaatgtcccctctttccattttgccatcaattgacatcagccatggtttcataaccagacccttcagcacacagctcacggcagatccctcggtgaacagaacctgtctttcttgaaggctgtgtggccagcacctttgattactcaagcaccacgttcattctctcactccttcccacaaaagtgtgtgtgatattgatcccagacataacattgagttctccccaagaaggattctgagaagtgaaattctcaccacctccctccatctacagtcacctcttcactgagtttttgctgtgagactcagagataatgactgttttccagtgtccctgcctggtctttgagcctcgcaggcctcaggatgtccctactccttccatctatgagccaaatgactcttgactgagccctagcttcatgccaggacaggtggcccaaacaaaacagcttccagaatcacaatgagaaatcactccgaatgcaatatccttctcagggaaactcctgacccagagcagacccaagaaagcaagctagggctttcctagagcatgggcctggctatggcgaccaattcatccctgtttgcccaggactttcccagtttttgcactgaaagactcatgtctcatgtacccctcagtctcaggcaaactgggatggttgatcactataagcctgtcccagtaatgatccttgacaaaaaccaagggctcatgaggccagccagtgaagccaagcttcatataagcagatcagagagatgttggaaacatacagagaaggggcagaatcagccctggttgcaggtgggcttaggagacaatctcatcagaaaagggcacacaagcgagctctaggtacacgggccaggcagcctcaggtgggctactgatgcatccaccatcagcatgactgatttctaccgtgcacagggcccagctcacacactgcagaaaattaggaaactgctgcaagagggggtccctatgggctaccacaggacaagaagaacatcccccgaagaccaccaaacacacactcactcagcactccccaggatccccgcatttgtagcccttccatgagtttctggtatatttccttaaccctcttctcctctccaagatgatggagggtgtgtgtgtgtgcgcgcatgtgtgctttagcagaggaaatgtgctacatcttcccaacaacccttctccactgcaaatcccactccttgaaaatccctccacaaaccactgtacacaaggaaccgagcctctcctccatgaccacgcgggagcacttgctgctcacccccacctcccaatagccagcctcctgcagaagaccctggggaatatcacgtctcataagcaaagccaccttggcccagacagcaaggcctcctggtgtgagaagtgggtggagactcaccaggactctgccagtcagtgtctgggcggatatcatcacccccgcccagtccttcacggaggtcatccagccgacctcggcggccactgcctcctctttttcatccactggtttgagagtgccatccgcctggcttgagccattgttaatcttctgggcctcctggcaacagagagagcaagagttaagacatagggaacaatggatttaaataacatgctctacccataaagaaccagagccagaaggggtccccagctgagatggaaactagcttaaaggtataggagtaaagcagaaggggtaaattatgcctttgatttttttaaagcctttatttaaaaaagaatattttctttatttcctcttaaaatatcttagtgaaacaaagaaggatggtattattctattctattttattttattttattttttgagatgaagtctcactctgtcacccaggctggagtgcagtggcgcaatctcggctctctgcaacctccacccaccaggtgcaagcaattctcacgcctcagcctccctagtagctagaattacaggcgcgcggccaccatgctcggctaatttttgtatttttagtagagagggtttcaccatgttggccaggctggtctcaaactcctgacctcaagtgatccgcccacctcagcctcccaaagttctggtctcctcccattttaaagaaaaagaaaataccaaagcaagaggaaacgcaatctgtctaagattagggcatgctgaggagggaggaggaaagtgtgggagatgtcctgtggtctttgcctacccagcctctatgccccttttcacagcagcacccccactttcctttaggaaaattatctcttcctctcagtctatgtagttcaaaggggacagatggcctcacattggctccaacattggagtcctttctaccccctgccaacagcaattgggccattaataatcacatgatccatgccaagccaataagactcaagcgtggaacatttgcaggaaagaataggaaaagtcatccttccctgagaatgaagccactgcagagaaaagtaaaagtaatagactactgatgtcatcatttgaacacccggatccagctgtgcctgaaatctacaccagacctttccagttacaggagacaatacattccccttctggcttaaaatgtgcttgaggaaacaaggctgatttcatcagataactgagccccacacaggggccgaaactgtaaacctttgcatacagtgagtgttctgcctggaatactcttctcccacagagacttatggcctgctcccttaagtctttgctcaaatatctccttttcaatgaagtcttccctggccacctgtttaaatttgcaacactttctttccaatagcacttttctgctttatttttctccatagcacttaaaaccgctaatatacttaataattcatttacttctttcacttactgtctgccttccccactgctgcagccttggtgcctaatagagtgtctgggacagagttggctcaataaccatgaatgaatgactagaaagggctatgagtatcagcccctcgttagctacaaaggctgggtttagtgttgccagataaaatacaggatacccagtaaaatttaaatttcagataaacaacaaataactttttagtataagtatattccaaataccacatgggacatgcttatactaaaaccttattatttatctaacaatgtacatttaactggaccccaacacaaatacccactgcaactatgactgcagatgaagatgtttaaaaagatgccagcaaattatgttcatcatttaaaactctggaattaattcccaaggcaaagccacactggggatcattgtgatttggagtaaggggaagaaccaaagacagtggtgaaaagctttgtctgcagtgacaaagggggcggggcagagggaggccaggcacgtgggaggcaggtggggagggtgcactggtgagtcatcctcttggggacttggccacggcaggcaggaagctggtcccgattcctgcttctctccctctggctgcctgtggctcagggaagctggggaagagaaaagtgggacctgcagccctggacgctaatattttctttccaaatgtgttaagccccacagagctacaatgatccaagaggaggcccaggagggggaggccactgggcagatgtatctgggggctgcctgctgacatgtgtgggacctgctgcccaagcctcccaggccagcctcagataggacctgttaggtcttgccctggtccctgagcctctgccctgtgagactctgaacaggagggtatttaggaggatggggaggccctgatacagggtcaaccatggtaactgaaggtgtagattcgggggaaaatccagctctgccaccgctgtgggacctcaataagatggggacagtactgccagcccctcaggcattgtcaggattaaacagtgtccaatagcacaaaacacaggttcaagcaattatcccagcaccccttgcttcttctcgtgcccctgacaccataaagcaatggttatcacaatgagcgggcatcataagcacaccagagggcttgttgaaacacagtgtgctgggcccatcccagaacctacattcgaaccaagatgtcaggcacttctgatgctgctgggcttggaagcctactttggggaccacagctcctgactaccctagtatggctcggtgactgctgaaatgagacatggatcttcacccccagctctctcctggcctctcccttcacccaaggacagaaccacctgcttgtttcaatattggacattggtggaggggtgaggaaaagaggagggcagggagatcgtcccacatctgaggctctagtgtttccttttgagtcaagcctcccaggatgtttctgaactggtccctggccaccacgtggggacctggaagatagctccctgctcctcagtcctgggggcccaagttccacagccccttggtagaccctggagaggagaaatcaacgtgaaaaaggctgggaggcaggggggccctccagtcacagtggttaactgcatcagtaattcatagcacaagaggtatgtggcagataatgctatttcgccagccctcttacctattgttttacaaggcattcattattttaattactttatgataggcaaggaaaaacacagactaaagggagataatgcccttgttattatttgcttacactagatgttgtgagcttaattaccatgtgtgggaagcaggactgggaggagtgatgggggagctatttaaagcctgatgccagccggccagactagccaccaggctagccacagatcttgtgcctggaggaagaggcccctctctccaccactgacttcactctggccaaagcacctcttatggggagcaggcattataactccatgctccaaagaaaaagcagagaaggttcagtagccttgctgggaacatgcaggggcagagtccattataagagtgttggccaccattgaacaagccagaactaggtgccagcaactaagaattaagtgttttctatgcattgtcttgcttaaaccttataatacatccaacaggcaagtgaaattatttccattttacagacagggtaactaagagcaggtatctctcagaaaaaggcacagagcctgagagctcaggctggaagcagagagcccacctgggcttgtacctgctccagaacttccaagctgatggctgtggcccatcaacccttgagtctcagcctcttccatgtaagatggggacaaacatgccgcctcattaaggtggtggggaagctgaagcttggcacagtcccgggcacacagtggttacagctgccctgatgaagcacccgctgatggggctggggcctctaagagtaatccactgaagctgcaccactttcatcaaccagtggccctgggaggcacactggccagagtgaacctttaataaataatcacagaatggaggataaggaggtgcaggttctaacactgttatcctccaatgagcaagaagtccctataaggcaaggtgctgtgactcctgcagggcttctagtaggcgctgtgtgaccaccacccaggacagctggggcagggattcccgcacagggtggaccccagacccagtgacatctcagaccccttctgactcgccccattagatcaacctcccatttttaagatgagaacgctgaggaccagggagaggctgcctcctgagtcccagcattccgttcttgctcctggccccacaggatactgcctcacaggggaacaaatggtttgttccaaatagcaaaggggatatgcagccacgcccaaaccttccacctcccactgcagaggaccctgtccttacacaggaagcacttcccagtaggggcagcccgatgtcagtcaggaaatcactgagtgcgtgtgctcacacatgtgtgtgtgcatgtgtgagagtgtgtgcatgtgtgtgcacgtgtgagagtgtgtgcatgtgtgtgtgcgtttgtgtgcacgtgtgagtgtgtacgtgtgtgtgcatgtctgagaatgtgtgcatgtgtgtgtgcatctgtgtgtgtgctcacacatgcgtgtgtgtgtctgtgtgtgtaagggagagaaaccccactggctgcagcctccagctaccccagcttcaggaggacaggccaccagatcttctgaaatgcaagaaaagatgtcttgggaaaagaaaggaacatggagggaagaatagggagaaaaatgagaggtgaggccatcgcgtggggaggccatctcagaaagaggaggtcctgcaggagccctccccctgcccttggcagctccctgagaaagggattcggccttgcactggaggccactctggatctgcctccaaccctgccctctctccccactagagccttgtgtaaagcaggccacagctgcctctcagtggcaacagtgacatctaatttcagtgcccacatcagaaggtggggaggaattcagggcaagggtgcaggcacaggaggcagggaacaccagagagaagagtggccacagtcccctcccgacacccaccctaccaggcaacctctcacggggctgtgcccagccttacaccctcacccctttctatgccttctccccattccctttagtggtgttccccacgatgactttttgttgacatggccgcagaggggctcacccttcctatgtcacctggggccaagggcctgactgcaccccatcacctggtgctcaagatacaaacctcatctgatgcgtttgggcatttcccgctgaatcacaagatcaaagaccaaagcttgagaagggaccttagcaattcctgaggatccccaccaccacccaactaccacacacacagtgtacagatgagaaaactgaggcccagagggaaagccacaagctcagggccacccagcccagccaggtgaccaccgggccaggaagcaagccccagttgctctgtttcccttatctcttgttgcctccccgataagacaattgctccaaatctagcccaagtgacagtcactctgctgccccagcctggaacctggagttcagggtgttcctaggactggcagaaggctccacctagcctggtactgggttcaggtgtgagggtcacgacaagggctaatcctgcttgtcttcaaagggcccagccttccccagccacgacagctgctctggtctagcacaggagagcaagcttgtgctaatcctaggaccccacagccccatccctcagatttggctgtctccgtctctcatccttgctgaattagacccagtatactgggactctcaggtctgtggtgtggcaggaagaactatgaaaatcaaaagatactctggaccaagtccaacttttctgggtggcctccagcaagtcatgtcattcctcaaaccctccatattctcttctatgaacagggatgagtcctgccttgtcaccctgcctgattcttgcaggagccctaatctggtaacagagcattgcctttctgaaagcaactgctttacaaacggcaggcaagtggagtcactgtcctctggttctgggcaggaagcagggctgctctggagaaagaagtcctgtgccacaaagccagagccctcacagaacgcagggctcaacactcagattcctacccagctgcaacttgcagggcaggtcccccgttgtcaccctgcaccctaacaggatgtcaaattgccaagtctcagcaggtgacctgtcatgctgggcacaccctccctgacagggtgagctgctgccacacctgctctcacccggttggactctctcacccccaggcacactcctgacacctgtcaagctgaaccaggcaccaaggtcactgcaggcaccacacctgctggatgactgcctcaggcatgagaagctggctgggcccgccttgaggggatcccagggcccctccctgctgcctgcctagagccaagccttgaagctccaagtctgcctcgggtttaactacgtgtcagttctttggacactggttcctcatccaggatctgggaagttgtttaggcaaaggccatctgggaagaaaaatacttttcaaaaatgtaactgaaatcatgtcactgttgtacccaacaccctcctatggcttcttggcccattcagaggacaagtgaagtcttcacacccaatcagccccactcgtgcctgtcatcctgcgagtctgccgctcactagctccacttcagatgcaatggcctcctcatgctgccaggacattccagacccagtcccgtctcggggctgtctgcactggcctctgcctctgctccagagatccccgtggctgcaccctcatttctctcgagctttggttcacatcctcactttgtccatgagctctccacctcatcccgacctctccctgtctgtgctgtcttctccggagtgtgtctgccacctgcttcctttacttcatcattgtgtgctgtctgcaagctgcatgagggaaagagtttttgtctgtttctttttgttttgtttgttttgttttagacagagtctttctctgtcacccaggctggagtgcagtggcgtgatctcggctcactgcaacctctgcctcctgggttcaagcgattctcctgtctcagcctcctgagtgctaggagtataggcatgtgccaccacacctgtttagtttttgcatttttagtagagatgggggtttcaccatgtctgtttcatttatggctgtatcttcaatattgaatccctgtgagctcagagtaagcacctgacaaatcttggtgggtgggagggaaggaaggagtgggggaaggaggagaggagggaggagagctacagcaaatggaaagtcagttcttaccatgcacaatctagaatagatattactagtaaatagtactactaacaataattatactatcgactactgttttttagcatgatcatagtaactctatgacgttggtactaatgtcctccattgacagatgagaggttaagtagctggcccaggaagacacagtgtgaatttaaatccagctgtctgatgccaaaaagggacacgtacccatcctgctgtcctcccgggaacagtgtgagcagcagacgggagaatgcatgtgcaaggattattggctgctgcaaagtgcccacgaaaggtttattaacatgaagagcactcaattcatgccacttctgggtactgcttgtaccatcacgacccttcttccagggccctgtgcctatggagggcagttccatcaaggacagagaaacacagttcctttctctgccaagaacctgcccggaaccataaattcacccttcgtggagcagagtatcacattggaaatgagcgtggccaagctgacgggctgtgaagccctcctgctaagaaccacggttctctatgcagatgctgctaaaggaagatttggcttcctccctcgccatgcgtatccttggagtccttagcacgctctgcccagcggtctccagcactaagaggctgagctctgccgggcctgacgcacctgagtgggaggtagggttctgacagggaacaggagagatcaggttagcacaaaaccatctccgctagcccttttgggaccagagtaggggctgggaagcccctctcatccctggaagctggatgttctgcccagcaccctggaaccatgggatagtcccaggatgcttgacccccagagggctgtgagagaaggaagggcctcatgcctcacagcccctttgtcctcaaattttcctggtcaacatcagaaggccatttcccctgagccttcattgatggactgcgctctgagttactcattccatctgccaggagccccaccccaccctctccctggccactccattgccccatctcctctcgtctgttgaaactgacccagcagccccacatgctgctgtcctcaactgggcacaatgcagaagggctccttctctcctaccaaagggtgggggcagggggaagccttctggaccagaagctatgaagccaggcacaggctgtgtgccctgggccagtcacctaacctctctgagaagagtccctatctgggagacgagagggggtggtgagttaaatccacagttttctgtaccttgaggcccagcattgtgaggtgccccaggggggctggttaccaagggagggcagaggaggcagggccccggaccccgcggaaataaaagcgcctctgcattgagcaatttcacctattatggttctgtgctagactgcatctgagtgaagggattttctggggaaaaacattagaaatcccctgagtaaaagtccataggcccatgttagcttttttttgttttgttttgttttgttttgttttttgagaaagagtctcactctgttgcccaggctggagtacagtggcgtgatctcagctcactgcaatttctgcctcccaggttcaagtgattcttgtgcctcagcctccctagtagctgggattacaggcgtgtgtcatcatacccggctaatttttgtatttttagtacagacagggtttcaccatgttggccaggctggtctcaaacttctgacctcaagtgatccacctgcctcagcctcccaaagtgctaggatttacaggagtgagccacctcgcccggccccatgttagctttttaaaaaatgctttgtttcatgacaataactatgacatcctgtggcacagtttggcctaagatccagaagtgtctgaacctcaataccttaggaagccctggggctgctggtccctccccgcgggctgctctcctctccttcgcctcaggttttcaccagccccgaatgctggggctgggtcttccgtgtcccccctcccatgccaaagaggacatccacccagcaacctctttcacctcctgggcgggtttcccagccacgggcattctcccaggtaccaataatcctgcatattagggtattaggcagattacccaaagcagctcaagcaaatcaagcatagcatgggcaccaccagctggggttttcatggcaagagttctgcaaagggaatggatggaggaggtggttactctgagactcaaggaccagagaaatagggcaacaggggacccaggtctttcctagagctggtgtcaggagtggcagagttcacttctgcccctgggaagttgcatagtccaacctctccctggctgccatcacttctcctgctctgcaccccggagactctgcaccagcagggcttaagacatttgcactgattaattcacctagcagttactgtgtttgctaactgtgggctgtacctttagggaagggacacactgtccacagattcaggcaacaggaacttataaagaagctgggacctaaccgattaccccgagctgtcagaaagccctgtgagtttactgggtgtctcggctggacctacagtgctccaccattgaggcatttttagccattgctttctgggtgccctgtccagattctcactcttagaagcacccctgcgctgggtgtgaacaactactctttggaagtcttcatggtagaaaaaggccaggtgacctttaacaagtccttaccatcttgtgcctcaggtttctttgtctcaaatgcagggagccatgtaaacactccccaaggtctgtccagctctaaactgtctgacccggaggcctggattgttaagtcccttactttgcacgcactgtctcagctctgtaaccctgggcaagtcaatcaagcatcatttccctcccccgggaaatgctgcaggacagattccttttcagctcttctcagagccaggttcaaagctgctctcccattccctgaggaccaagggggtcaactggtgctcaggagatcactgatcccctcttacatctactgtgttctgtccttggtgattttacaccaacttaatcttcacaagaagcctgcaagataggaatgttttttctttttttcttttttctttttcttttgagacagagtctcactctgtcgcccaggatggagtgcagtgatgcaatctcagctcactgcagcctccgcctcccaggttcaaacgattctcctcctcagcctcccaggtagctgggattacaggcacccaccaccatgctccagtaattttttttttcctagtaagatggggtttcaacatgttggataggctggtctggaactcctgacctcaagtgatctgcccgcctcagcctcccaaagtgctgggattacaggcgtgagccaccacgcctggctgcaaggtaggaatgtcatgaggctcagagagattgggtaattttccaagattacccatcttgtaagtggcagagctgaaatttcaatctagtccattctaactctgaaggccatattttttctctctattccacactgtcttgggataggtccaatgtgcaagaacagagatggaatctccatataaaattctgtttactactactactgaaacaaccatctcacaacctatggcttctaagtaacaaaatcctgtagtacagacatctaaattcagttataatccactatgtacggacagagagttggagaaatgggctaggggacggggatccaacctgggaatacaatgctcattagacattagatatgttctcaaatggccacatatgctgcctaaaattagtaaggcaacctccaaactttcagggctaatacatacatcctggccaatgtgccgtatttgtaaaataacaatctccttctctttcaattagcttaataaaattggaaaatataagtgacagtccagagtccactatcagagccatagagactttgaattggattagtagagtcctcagccaggatgaccctggcagggtccaagacagcctgctgtccatcagagactcggagactcagctgccagtctgcagggcagcccatcctgccccagaagctcagctcaagacctgcccagacaagaaaactgtggcaggggcccagcaggaaggcaaaaattacatttgtttctcatcagggcagactgggatatggataaccaaacacacaggaaatcccaaaccctcatgttcataaaagaatgcagaaatcttcgtgccaagttaacttttaccggagggagcccattgccatcctgtagaccaggaggaggatccagcccccaaggagcctcactctcctcagcaaaggctcctgcaggtagctcacaggtgctctgttcccatgggtcctgcatggccacagggcagtgctgcccctgatgtggtacggaatgaaaagcctcagtacagcgcactgtgtgtgtcagtggaagacaactgatgaagggcctctcccaggaagaactgtccttttctttgacattatatcgttactcctttgttgggtattaacatgtccttttaatgaaatgacaatggtggcagagctggcatttgacagtttctttttttatgtttttgcttgtcaaaataaaaagctggtggccttgtgatattctgttttataaaaattcattgattatcccacaaaaagtctaggaaccactcccctagcccaaatgcctcattctacaggcaggaaatttaaggccccaatattccacactcatagtggccaggttcccctcgaaaaatgtggctttcagacttcaggggcccagggtgtgtctgtcacactagccagaggcagccttggggccaggaaaggtagggtctgagggatggaggcatggtctctcagggctggaggagctctgcaagctgctggcccacacaataggggaaaggggaaggcaagcattttcagagctcagggccataccaaccgcctgagttcctggcatctaatgccttcactaccactactgcaggaaatgcacagaactataacaacctcccgggaaatactacaagtgttaccgtggccccaagccaccacccaaggggcaactgggaagaaagaattcaaccacagatagcagataggatgaattgtttatggttgaatattcccttcagagtcaacagaggactccaagcaatttggagtaaaaagatgagtaacccgagagcaatgtaagtcacagcccagtgccccacacggaagggaacacggtcatccccttcgctgctgttctttgcttcccaccactaccaccttcatcacacacgtgtgcttattctctagcagtcagggcagagtctgcctgatttgcccactccacatcctcaaagcctgaacagcacctagcacacggtgagcatttcacagtgcactgaaataataaatgaagaaattctgttttttgttctgtcctgctttgttttcactcttcgctcatatcttctggaatctcaaaaatcctgccaagtccacaatgccctaagcatagaagtcaaactcctcaaggcctgatcttcaaggcctggagctgaggctgccggctgccctccccactcgtcactgacctgctcttccacctgacttctcggctatgacttggtcctcctgactgccacacctccgtgctggctgttcccactcctgggatgctctccccattgctccccaaccatcttcatcctccctgatcaaatcccagaggtgcagtgaagttctccttcctggctagatctccccaaagctctccctgtcctgtctccagggcccacatctgctcccccaattccacatgggacaggtacttagctgtcttttggtccatgcatgttgcattgccccagttagcctggacaatccttgaaggcaaggcctatataccttttatgcccaaagtgtttggcatacagcaatgtgcttaacagacacgtaccgattgagtaaattaaatctctgctcagtgggcactggaaaagcaagagctttcccaggcatcactgacgtctgggtaaaccaggccagtttccatgacttgaagcttaaactgggggttggctcctaactgctgttcctcagggcagctacattttcaaataaaaacactaaatcccaaatgagatcagatgacatggagcttctgagaggcacatgccctaccaggcatgtcagtcaaaagaaagatgaatgttcttgtttacaaaaggatttgtcccgtgccaggaaaatttccaccatgatttaggacctaatccagtctgtgcctatagacctcaccaactgaacatgttcccgcttcttccatttgctgaacttggatggggcttggcttcgggtcaaaagagctgtcccaattaggtcgtcagacagcctttccccacacttaagatgatccccattcaggaaaccaagggctagcaagacagacagactttgggaggcagaaagatggccaggttaccaggcatacagcggcagtcaggatctaccgctccgagcacagcccagcctgaggaaccaggctcccagagctgccctgctccctggactctgcctctgacctcaccccttggaagaactggctgggttccaaaacttcagcctctatgtccctgggttcccacacaccctagtttggatctaggtctccaacacagcagccaaacacaagagagtccagagcagttgctaatgtgaaataaaaacaattcaacagcccagggaaaggagacaggacttctttttccattggattcagagaactccttctccttttccttctcgatccctaatgggagttaaggatggcaagcgcctggccctgcaaagcctcaactctctacttggctccgctagacccatcaatcttctctccatggcctgggacccctccaaccctggacgtcgagagagactcggcagctgtgagaaccttctttctcaagtaaggtttttttccaaaattatatcaggtttccttctaccccagcttgtcagtgggggactcttttgcctaacatggttgaggaatgtcttagaaactggtgtgattcaatctggcttctgatgaggttttccacccagacagagctcaccgagtgtctggaagtgtcggttccctacacccaggggcatccacaccctgtccccatctccagacctcagtgaggaggatacccttgacaaagtggctggtccagccctacgatgaagttggatccagaaaaagagccaagaggaagccaaaaggacttgcccacacacttgcatccacgggggcctccctcctaccatgtcccctctttcccccaactttctaaattggtgaatctacttgcaacacacccagtataaataattgaagagctcccgatggaagtggctcaataattgaaatctcaaaaggcacacacctttcttttagaagagagggccacctcattcagacttctccaggggaagtcgttcttcccctcattccttttcagactggcctccttctacaaatacagattttaaccagagggtaattgttagaaagtgcagtttgcaaaaatgtcagtaacctgaatgccaagtttactaatgaattgtgactaggctgttgttagtgccgccacactctcacctgaagacccacaatctcccctggacagagggaaactggctgtccctctgttactgctcagctactgcactgaggtggggtggcaccagggggactggcatgaaggtcacatgaggggagagttccttttacatctcagaagtctcttattataaggatctgccaactgcaaggagagaagagccctgcagagcagagggacctgccagagcgctgcaggcatcaactttgctggcgtcttggaaagacgccccacgtctccataacaactaaccatccagcccttagcactgacagggatggagaccttttttggaggagcagatccggaagaaaggtcaggtggttacctgaatcccaagtctctttgttttgttttgttttgtttttctccttttgcagctgtttttcttactagaagctaggcagaaagagttgttactcagatttcttgaacttgagacgtcaaaggtgagacgccagccaaggagaagggatggtcagggaagcttctggggataccgacagtattttattttttgaactcagtggtagtgacacaaattttctataataatttgctattttgtaatttttcattttatagacttttctgtctatactatttttttaaagtctttaaaaaataaattgggcaaactgctcttcagggacccatcgtcattgccagcatttattaagtatcttctggcacaggacagaaatcagtctgcaaatcaccctgtgtcacagccctggaaagcaggactgagaaccagaaaacttcagtggaagtcattggtcccagtggccaaagcaccaaactgaagaagaaagtgaagaggtcaggggcaatcacaacaagtcataggatcaatgggctagaggccccagagaacttgttgatgcagtttgctgttatcccagctttagagctctgcctataaacaaagtcatagagaggggaatgtgattcatgatttgtacctgccttggaagggcctgaagtgaattggggtacgcagggccctggccatcagtgaaagagtgggtcttctgctgccctgctgatccactgctgagggtaactcatggtcccagcacagccttcactgaactgtcaggcacatgaagcaatcaggagtctagattgagtttccaaaacaggagcacctctttgctctctgtaagcctccactgatggctcatgccagccacatggctcccctagcctcccctgcacccaccggaggctgttaatagacctgtcattgtgctcatgttggattaatgaccactgttctccttcccaaatcctacacattgtttaagagaaagcctaaacgctgcctctgccatgaagcctctccagacctcttcagtagagctaacgtctccagggctgtttgctcaatacttcctttcaggtatcagtcccctcagatatcacttgtttctctgcttatcagtcctcattacattctagtccagtggctacatccatcagtctcccggctaagaacctgaggtcaggagccagggcttattaattcttatatttcatagcatctagcactgggcctggtggatttgtagcaggtgtgcaacaaacaatcaatatttattaatatatcagggtccaagagcacagacccagtaaccaggaaggaaggttctttaggttgtcagagaacacaaagggcctggcaggagggaggccaagcatcacagagaaccttcacctttcaaatctacccacttctctccatctcagcttctctcccctggttgactcctaagcttcataatcatttacattgtatcatgcaatggtacaattcccacttagttctgcccctcattctccacactgaagccagagagataccacaaggtttctatcagtcacatcatgcctgtgcttaaactcttctcagggactcccccttgctcttaggcaaaagttaaggccctcagcatggccgtcgaagatgctctggcacatctggcctttgccaggcatctggccacatactgaaatactcttggcctcacctcccttaatccacagcaatactggacattcttgcattccttcaatgagcactcctcttttctaattcagggatctgcatgtcctaggtttccttttcctgtaacaaccttcttcacacagtcatattccagatgtcctactcatatttaagatctctccccaggaagcctttcctaactcaccctccacctccactccaccaccaccattgctatcagtcaataaaaccttccaatcatgtggtctttgcactgctccttcataacactcaaggcatttgcaagtacttgttcagggcctctttgcttcactagactagaggtgggcaaattgtttctgtaaagggccagataggaaatattttaggctttagcatatggtctctgttgcaactattcagctctgttgctggggggcaaaagtggccttagacaatatataaacaaaggagtgtggttgtattccagcggaattttatttagagacattgaaatcagaatttcataccatttcatgtttcatgaaatattcttcatttaaaatttttgttcaactatttaaaaatgtgaaaaccattcttagctaatgggccatacaaaaacagatggcaggccagacttggcccacagcctgtggtgtgccagctcctgcactagactatcagtttcctagagacggaagccacgtcttgttcacagatgtatctctccagcacagtgtcttgttctcacaaggcggttcataaaaattcactgaatgccttgatatgtggactagagccatgtttcccagtgtaaattcacggaacaccagtctgatgggaaactccatacaaaagggacacttctctttgcagtgaaatctggaaatgccatcattcctcttctaacaaatgttcaatgctcactgcatacagcatagcaaaagctcagagatagccttcagtcaaggaacctgttcaacatagaccaatacaatgctgcccacactcattttgaccaaataactttcttctttaacccaaaatatctgccagtgtccaagggcagccccactgaaaagtgatgcagtgaggagagacggcagaatttagaggaatgggtctcaaactttagtgtgcatcagagtcaccaggaaggcttattaaaataagaaactaccccagcccagagtttccaattcagtaggcttaggttggagcataagaatttacatgccttacatgtttctcagctgacgctaatgctgatggctaggggaaccccgttttgagaaacactgatctgcagaataaatgatttcaaggcttcggtcctctagctggagtttgctcctccatccaaggatcttattcccaggtgaactccaacttgtccactttctcacactggcagtagcagctctgacccatctttctagtcttaggcacctgtaatgggttgcagtgtttttttccaaaagatttgtttcaatagtaatccccagttcctgtgaaggtaagccttatttggaaagaaggtctttgcagatgtaatcaagttaaaatgaggtcatactggagtagggtgagctcctaatccaatatgactggtgtccctaggagaggaggaaagagacacacatagggagaacgccccatgaccaaagaagcagagactggagtggtggctgcaagtcaaagactgccagccaccagcagaaacacggaagatgcaaggaaggagaaaccctacaggcttcagagggaggctggccctgctgacatcttgatttaagccttccagccttctgaactgtgagacaataaattaacattgttttaagtcaaccccgttgttatggcatcactaagaaacattctagtccaaggacagataaagctctggccaaggccttattcttggtaggtgtccacatgaactctgaaggaggaagccacgatgtcagctgtctgttccctttgtcatcactgctagacagtgggtgtctgcgctggggtctgtttttggaaattagattatctaattaatgtgatgttttgttggatccatgccttagggctggatttggcaaaaagcatgtgattattttttactcttaaaaaaatgtcactaaataagataaggagacttggctttgccctatcttgggctccacatgtcctgtttctcactgagagaccctggcaaggagtttctcagtgacaaagaaatggtttcttctcctctagttctgagctataaacaccttctctaatcgacatagaaacggctaagcagtagatattttcagtcagagtaccccagttttagtcataaattatatgcctctccttttggaaatataaggggtataatttttattcttgggcagacatagtcctgtgcccgataccttaggaaagagccaaaaagagaatgtggacacagcttgtcatggtggatggagaggaaggagacaccaggggtagggactctgtattctgaagctctgaggccacaggatgaaaaatcagagccaagtgaatgccttctctgcctctccaatccatgccaacccagggctggctgctcacatggggtctgcacaaacttgaaaatctccagatgttttataggggggacaaagccacgctttctgctgcaacagactgtgagacttttaggatgctcaccccaaggcccttgaaaaatgagagaggggtctgattctttgagatgggtaaggcagaggcaccccgtggaagtcaagcattccttctctcttccctcccaaggccagcatgtaatttcaaatgtccagtccatccatgaacaatatgttagcctttggccaggcggtgagcttccaaaatgcaaacatctcagcctctgtctgcagaggtgagaattcagcttggcagaggaatgggacactgtcaaggaagacaagcttttggagtcagacaatcccaggtttgcatattggccttgttttgttggtttgttttgctttgtgttaaaatctaatttattctgcaaactacagcaggttagttaatcctttgaaacctcaggtttctgagctataatacaggaataattataagtgctttgcagcagatttgtgaggattctgagagttgttggatgtgtctagcacattccttctaacttataaagcattatatgccaagtatgaatctaagtaatgcacatgccctaatcttttccatccttacaactatttatagcactgcccccatatggcaaatgaaggctcagagaggtcaaggcacctgcccacagtcacaaagtcagtaagcagctgattctggagctggtgctctcaccacagggactgctatatacccatagtggaagcctggggctaggaatgaagatctgtgttcattcattcattcattcattcattcaacaattcacctgggcatctctgagagaggattactcacaacaggttctcagacaaaaaaaaaaatacaatctctccttccaggagttgaagatctctcaggggaaacagacaagtacccaaaactaaatcaaggtagaatatgacaccagggaggaagagagtatggcagaggacctgttaaatggcaggaacagactgatttaatgaaggtggtggtatttctgctgagcctcaaaggataggcatgattttgacagatgcactcagcctggttcagtccaaattagggcccccttgttctttctcatcacaacccattcatttcctttgttggactcactgtgattttaatttcacagctatttgctgatttatttgttcaatgctggtctcccacactagaccatgagcaggaaggagaggcagcatgcaactgtgctcgttgtctacacagggcctagcactgggcctgggccagggcaggcacctgggaggtatgtgctgaataaatgaatggatggatgggtggatggatgggtggatggatgagtggatggatggatggatggatgagtggatggatggatggatggatggatggatggatggatggatggatgaggatataagtattggcaggctggtggcagcttgcagaaggagagcacattatctataaacacattgccccgatttatttaacattgtagtcactccaaatcttggttaccctcacctgaattttctcttttgggggaagttttacacaaccaccccagtttccctaaatgccccctccctggattcctgcagcacttgaatttaggcttctgagcactggtatctccccaaatagatgagactccccatgtgggcagcagccctgccttctccttcatgtttgtccacagtgcttgggtgagatctggacatgtagcccacactctgttgaaacctgcccatggcatgcagctgaggggccctgccttctccttgtcctcatttattgccatcagtcaaccaccaatcatcccacatcgaccccagaggcattggtcttggggtctccctggtgcggcaatgtgggctgccttcccagccttgtccaggtggcaggacttctgctgctgacaacagggctgtgatactcagctccccaaggctgaactggatgactaagagtcctaatgattctggtattttttcaggacctgtctccaaaggcaggaggacatttaaaaatgcatgggtctctgctaggtgacacatcctgcttaggagtctgctggcctccagtctgggacaacagagcacttcaaataggcacctgtgttcatcgcggtgctttctgtccacacagggccttggtttctgaggctgagagaggataagctaagcaaggggcagaacaggacaccaaccatctccagaccccagtacaacacagatggcaggccaaagagggactgtgtcgtctgattcaagagtacagactacacagccagaataatcggggcctggcttggactctctttaaatattcattcctcatctgtaaaatgagcatatgagtcccacttcaccagactgtaggacatacgtgaaggactctgcagtgtctggaacatatttatggcccctgaaataaacagttattgatgacagagatgaaaagaagaagatccaatggagtaatcttcaaggcctgcttcaagtcttgccttggtaaagctttctattgggcactcatataaagcttatatgacttttttttgtatataacagacatgtatatatgatgactgtctactgggtatggttctgagcactccctaaatagtaactcattgaatcctcacaacaagtttatgtagtatgtactattattatgcccattttacggatgaggaaaataggcatgaggggttaggtgaacgactcgaggtcacacagttataagaggttgagctgggatataaatccagacagtctgcgctagagttcgtgttagttaaagatggatacagtgtgctgctgttattattcttgtagatgttgactattatagtctcttgtcttgcggagcagagctagtctctctcccactttcttgacaaatggtaggggcctcccctataacatctctgaagcccctgcagcacttcatagagccagtcagagtgagtttgctgacccacttgccaggacttgctgtgccctctgccttcttcaaggcatccccagcagagccttaaagggcaaagcctgcacacctccctctgcagcactgctgcatgccccacctccttccagggccacgctttccaacttgtgacctggacccaaagtaagaaatacattttacatcgtgacccacacatacctactatacaagtaattgcaacacaggattcatgaaacaatacctacactattacatggaatgtactttgatatcctgtattttttaacattgattacaactcactaaattgatttcataatccacttagaaaattcctcttaggggagttcagctccaacatctagcacatgcaatttctgagtgcagtgcacagcaattcttcccaaaggcagcccttcctggtgcacatcagcatcatggtgctgtcccagcccagatggtcacttatatattccccagagccctgagcctggctggagcacccaggcagtggaaagtcaatacaggctgggaatcaaggacccattcaaaacaatgctcacagcagacacagagtgaagaggcttgctttagagtatgatagaactgagctcaaatctcacctctgctagttactaactcagatgttattggacgggttcttaacctctgtgagcttcagtgccctcccctggaagggggcactatcaatatgcaccacagagggtgttagctgagatgtggagatgacttggcacagcacccagatacagatactgaatcagtgccagtcagtggtggtgggaggtctttgctaacacctcacaagggccttccctcccctctctttttgtctctatatttagagattctacaaccttcagaagaaatagcagtacttcctagcacataggtaacactcaacaaatgtctgaaccaattaagcaagggcccaggcttttgcccaataagtcatccaatcctgagcatccatccattcatttatttatttatttatttatttatttatttatttatttatttattgagatggagtctcgctctgtcacccaggctggagtgcagtggcatgatctcggctcactgctgcaacctccacctcccacgttcaagcaattctcctgcctcagcttcccgagtagctgggactacaggtgcatgccaccacgcctggctaatttttgtatttttagtagagacagggtttcaccatgttggccaggatggtcttgatctcctgaccttgtaatccacctgcctcggcctcccaaagtgctgggattacaggtgtgagccaccatgcccagctctaagcatccttttgaaggaagatgtgttttataatcccttctaaattcagtggccaataaagtctgctccgtgaattacactcattcaatcacagctgatatctctagatcaaggacaatgcccctctctacaggtgggaagacaaaaccaggaggtcccaatgtggcttctccaaggttcccccaaagttactgtcagtgcagagctggggtgacagagcccctgctcatcactgcctatgttgccttccaagagagaagcaagttgctcaataaatagctcatcaccctaaaaataacgaggtctctgatgagacttagtctctaatgaaactaagcacaggactgagggggtgaagagcaagcagaaaatggatttccaccatgggctagactgttcacgtggcccagtggtggagagaatccttagggaaagcctaactccgaagcccagagaaggaaggaaaactaataaggagtgtgttttgcaggctgatttttctgaagttatccataggaaaattcatttatgtgagaggctaattagtcatgacagtgctttgctccagacataattgcattggtcccatgcagtctctgtgggtcagcctgtaatggaatttccattacctattgtgttttggttactggagaaaaatgtgtgattggggaagaaagagggatgaagagaaaacatgaaaggctggaataccttgaatatccataaaaaccatctgtgattttaaaacttcataaagatgatggatctctaagagccagatagtcttcttggaatctgagctctgtctgcgggaactgctcctggcaggcagtgggttttgaaatccaagtttgtcagaccacagagcaaagcgagctgccccagcttggccactaggggtggaaacaagacccaggaaagggagactaaatgttcttctcaactagccaccagctctcaggctgccaggaatgctgggctgtggtaaatgaatatatagatatatagatatatgggtctggtgccagaaatgtgcaggtctgcagggatgagtatgaaaggcctcacctctcctgccttctagagaataatatacagttcaagagccaaagatgcctgagggtgaactggtatgccaagttcggaagggtcaccaaaccacctaatcccccaagtgttagagccaggaacagaagggggttttaagttcagggtttctcaacctcagcacaattgtcactttggctagatggataaactttttgttgtgggaggctgtcctgtatattgcaggaggtttggcagcatccctggcatctatccagtagctattctcctccattccacccccatccttaattgtgacaactaaaatgtctcccaacatggccaaacgtcccctcgagggcaaaatcgccaccatttgaacatcgctggtctacccttacaattcccaaagtagaattccaaggaatattaatttcataagcttctccccaacacaagtattctatggtcaactaagtttgagaatcactgcatattgtaccctcttttggaaattccccatagtagtctattaaaggccctaaaaagttctgcaataagaagaacactatttaattgttttgtttgacctaacatcttgcaagctttctcaaacaaaacccctttattcctatatttgcatctttcagagttcctgttccaaagaatattgtgatttatatatatgttaatatgtatctatcatatatgtatatatatgatatatcaggcaacccaacctttccattgaacaagaggaactgaagcaataagcaagtcagggttcaaaatcctactaagagatgagtgtcagagccatgcatagaagctgaagtcctgattcccagtctacctccttctcttacacaaatgatttagattaatcctcaagaagatacaagatacaagaaaccatcctctcacagccatgtcacaatttggtttgtgaaaggaaagtaaaatcttgggaccctcaactcactatgccaaaagaaagagtgaactttgtcatgcaaaagctgctttctctttgttcctaaacagattgctgcaagagagaaggtcacctatctccccaggtagcctctctcaccctgacaatgtatcttcacaggtaagggacaaagacaagactagaaatcatccctctgcccacctcaagacaaatgcagatctgacttcttcttcctctactctatgtttactttatcttatgtaaaatacaagatttactgagcaggagccgaatgcactattgagtgtccctctttttgctccttcccactctcctgcctttaaatactgaagttctcaaaaccctctttggaaaaagcacaggccacagagtctactgtagcctttatctctttttcctgggctcatcctcaaccttggcaaaatgaacctctaaattgattgagaactctttcagacatgttttggtttataggctccaccaccaccatccagaatactcacctaggaacaacgcctagtgaaacatcagcatttctgttccccaggagaacagacaaagcaggcactttttgcagacatagttgagaaggacctcacagtggtcataacaagggagggtgcaaggaggcgccatccacttacatcatgtccatgcacctgctaatctactataagtacaactcccatgagaatcactaaagctgattcgtctttgtatcaatgcaatacatctttgtattgtggcgagcacagagtgggcctccattaagttaggtggaaggaataaactgttaggcaacacatgctaaggacttgtccatcaacatgccttgattataattcacagatcgtcaccaacacaataaagcctccccaatcctctctgtcctcttcatgattttcttgggaaatattctaccctggcctctccaggctgcagggaactactccttttaggatggcagctccccgcttccctgacacatctactgtcatctcttcacttgcgccagttcagaaagataaaagatcaatttccagctcagatcagccagcccaatgtccctcctgaagacagtacatcaagggaccagtttcctatcattctaggtagaaaacatgcagtgactggtcattcagtctcttgatggtctctcttgccaaaagcaggcactggagaggccatagattggctcccattctcagattgcaaacaatagaactaatattgacagagaaactggatggtatgacattctacaattttgcatggggattgaaatgtaatcataccttgaggcctctggtattccaggaatcctctttcagccctgggaacagaacagtgtcctagggatttctctaatccttttatgacattctaagcagagtgtatggatgcaggaacagccaagagtctcagccagagggcagacctggggccccctcttggtttaccttggctccagccagtccaaagaatacacaggcagcttgcagaccactgagttgagactaagggctcagccctagggcagctgcaacacaaatgcagcagcaactgctagatatttgcagcatgcccctgaagtctggtctgttgtaaaaaaaaaaaaaaaaaaaaaaaaaaaaaaaaaaggccgggagcggtggctcacgcctgtaatcccaaaactttgggaagccgatgcggatggatcacgaggttaggagattgagactatcctggccaacatggtgaaaccccatctctaaaatataaaaaattagccgggtgtggtggtgcacacctgtagtcccagctactcgggaggttgaggcacgggaatcacttggacccgggaggcagaggttgcagtgagccaagatcgtgccactgcactccagcctggcgacagagcaagactctatctctgaaaaaaaaaaaggctcacagcaaagggtgtggaggttgggatgctcagcttcggggcaggagaagcatacagcaagcctctcacacctgcaggactccaggctcccagagccacagctgcactctacctctctcctttcctttccccttctgagcaccttcgggttactgggataaagtagtgcttaatgagaggccaaagggactttgcctccttgaggctttttgattgctttgcacaaaactcatagaatcaccttatgttccttcacttaatcagtcacttatgagcactattctaggcactgcgtgaggctgggaaggccctgctcacctgttactcttactctgttatgctcttcgtaaaatccatcaaaaacaagcagtcatcctgcttctcttatttccccatttcacaactgtggaacccaagtacagccatccagtgtcagactcatgaacttcagaagcagaagcctgaagatgagctttggagtcactgtcacagcaacaagccaactggcatgcagaaatgaagagactcactcaaatgagggacctaaatcccttctatggtcaatgagaaacagaggcccatgaaagggaaaggccagatacaccctcacacaaggaagtggtggcagagccaggcccagacagcagagatctcaaaggtccccattttcaatgttgtgtttcttccatactgtcatttcaaaagagccatttaaggctgggacactctggtcccactcaaaaaaaacaacaacaaatcattaaactttcaacttttaaaaaactaccaaacaggttgcaaaacactttcttatcctacacctgggcgagagagacttacagagggggaaggggcagggagggaagaaggagagggtcatgaatggtgagggggaagggactgagtgagggtggaagtgttcatgattgggatggagtagagattagggagccttgaacctccctgaaggtgagaaaagatcacggatatctgttcatgaatttaaaaagactccgcaacttcatattcagagaggagcaggactcaggaatcaggcaatggtcatgaggtaagtttcaatttttcaaaacaaaggtgatttcatttttaaaaatttgttgtttatttgtcaagagaaactatttatttttatttttattttgagacagagtctcactctgttacccaggctggagtgcaatgctatgatctccgctcactgcaacatccacctcccgggttcaagcaattctcacgcctcagcctcccgagtagctgggactacaggtgcacaccaccacatctggctaatttttgtatttttagtagagacagggtttcaccatgttggtcaggctggtcttgaacttctggcctcaagtgatctgcccaccttggcctcccaaaattctgggattacaggcatgagccactgtgcccagccttaagaaaaactatttcttaagccacatattcatgttttatagttcaagaacacaggtcagtgacaaatctctaggtaattcttcccaaaggaatactttatattccaaaatcactttgcactctgaaagatacctcatctcctcaaaatctttcatagaatcataatttctgtagaatccgtgtatgccttcttttttagttcagccacagcaaagttacagagggttgcaacccccagggaaataacaaatgcgccaacaatatgaaatcacagatgctcagccagaaggccatgtatctgaggttttgtcaaagcaccggaagccacagtagttattatgctcaaaaggtatgtcagcctcaacaccagcatccttcctggctgatcgatttcattttttgacagatgagtttgacaccgccaatcagtggcaccaagggactgtatcataatatcctaatggtcccgaggctgattcccacgccacaagggtaactgcaattccatcaagccacagccaaatacagaatgcctcccatttaggaagctcagttaaactttttatgtcaccaacacgccccaacctcagagttgtcccttcctcactcaacacacgggacatttatcttcaacgtcaccacctagcttcaagcttccttcggcttccccaaccacagtccccactaactacaagctcaggccagcgctacagcctgctgaccactggcaaggggccttggcacatctagacatctgcagccaggcctgcctctcaccttctaggctattttctctgtagaagaacaaactgcttgaaaatcagactgcaccagaacaggcattcttcctgctgctgtggaagtgtgtctcgttcctgtggaaaggaggtatcttgttctggacagtgtgggctggagctgctggcggtcagaacagggaagatcgtgttcaggaagaacaccatccctgagagaaccagtctcccgacacacatctcaaggccagcctgcaccagctcaaccctctcctaagcgagaggctcccctattagcgtgatgcatgtcttggaccattatggattgacatacattcttttgtatgaagatattcaatgctgcacatggcatctctcacgacaggacccccgaacccagaacacagctgctgaggaacaggtgctccatcaatacgggtgaaatagatgaatacgtccaagtgccggtgtcgagcactggaaatacaaggacgataaagacaccacccctgcctccaaggagttttttggctagtgggagattcccccttgttatttgtcactggtggggtcagaaatggagtcaaggtcagcgggttttggactaatctagaagaaggactggatcagtgcttcttaaatgtgttattcacatactcccatcacaacttctgccctagctgcatgactcctatgctattcactaaacatttttctttcaatggagtcaaattttttaactaaacaaagatatcttttttggggagagagtctcactctgcctcctaggatggagggcagtggtgtgatcataactcactgcaggctcaacctcccacttcagcctcctgaaaagctgggactacaggcatgtgctaccacacctggctattttttttttaattttttgtagagatggtgtctccctctgttgcctaggctggcctcaaactcctaggctcaagcgatcttcccgcctcagcctcccaaagtgctgagattacagcaatgagccactgcacccagcttaaataaatatatcttaaggatactccgtaacattaccacatgtgaaaaactggtatcaccagtgaagaaatagaagataaccttcaaaataaacaaaatagaagaaaactttcaaaataaatgcaaaacaaaaccagggtatgaaattctaggtagatgcctccgtttgcatgcagtctcaatgggggctgttctgtgcctttgttcaaaagggagacaggcaagggttaagagatgttcaaacagtaaaccgagactttctccctgagataactagaaagactggaagaaaactggaaatgaactaaatccctccttggtgactcagggtcctgtccatatatcactagaaggtatctgctacaccacctgtggtgtggggaaaccataaagctgaaatgagctttaacatttctttcaacatccaggtcctataacaccataagcagattatttaatgtcaaagaaatcaagcgcatggaagaaagacagcacctaaacaacacaggtctgttgactgaattagatttccaaagtttctggccctcccagattcattatatcctatggtcttcgggttacaaatgaggacagaaaagcagagagagaggagggaatgtacccaacccatccacctggcagtgacagagctcagaggtcttcattttggatgaaccatgggacccagatgcctatgaaaggggaggacttgtaatctttttattcccgatcttagactacctgtgtgtgcaatatgtgtttccaccactttgtgaagttcagccaaatggcccttaagaaatgaaggcaatgacttggtggaggccctgcacgtagagaacgtcagaaaaggctgaattggatccccagatgttcctaagacctgctgggggaagcttgcacaagtctggtccaaaatccgtttgtaaggaaattggtgaaaatcacagcaaagctggccttcacaggccacatacccaggccctgctctcaagcaacatcaggcttggatagatttttccagaaccccagatagagctgggctaacttaacaggttgaattcaaggcgtaccaaactttaaaactggaattggagttgactatttatattacaagaagattcttcactctccaaaagcaaccctttgtcgtctgagcacccctaaagacttaagtgtttgttaacagattactaaccatttggcaggagtgcaagcactaaagaaaacttgcagagaaaggaaggggagggaactggaatctctgcaccattggttcgccaagctttgtgctacatgcttcacttacagtatctcatttaactaatcctcccagcagggttaagaatctccattatacagaaaaggaaacagcacagagaagtgaagtaatttggccaaggtcacacaggtactacagcactagaagcaggggctgtttccagcagcacatgacatggaacttcctaaggaagtgccatttgcattttgttatcaccatctactaaaacatacccctctggcacacagtgcaataactatttattgacatgaatatacataaatgctaagaatgccatacacagtaaagatgaccatatggagcttaaaatttattacaggtcagaggtatcaaaagaaaattatctgaatatgccaggctagcaagggaggggattcttggtgcctaaagtcctactattccagtcttctttctttacacacacacacacacacacacacacacacacacacacactccttcagccaaaatgttccactttagtggagggaaaagagagcctggagccataagtctagcttattgctgatgcctggtgttccccactctgcctcccaggatctggaatttatcttgaccaccagacagagcacagaactccattacctagggtgggccagggctgccacggagcagcattgtgtggctgtaccctccagaaactctggatgtaagatggaaggattgtagtacctggtggacaataggtgggaaaggatggagggtaaagaaaagcacaagacagggagaaaaaggaaggggagagtgggaggatgggaggcaggaagttcggttaaaatatactgtcagtggcaccggataaaaataatagccttttctgtgattgaaagcatttctaaaaatcaaagataggaacagctgctgtgctatggtggtgggattatgactgcttttgtaaatgtcttttaatgttcttatatagttttacagcaggtaaaattttggagcagaaagatataaaaacattcatggatagaaaattcagaacaagtcaccaaggggaacttggtttgtgataattttataaaacagtgttacatacattcctaacctatccccaggccccctgagagccacaaccaagacccattggaccaagcttctgaatttcacagagcttaatgggcttctgatggcaggggctagtcacccacaaagagaggccacaacatacagaggcaggaggcctgcaccggggccaggaccatgctctgtggacaaaatagatgatttcaggcaaatcccttacctggctgactcgggtcgtcttccttaaagtaagaggctgcatgcgatcaggagtgacaaactcaaatgctttaaagagttaggctgggatcacagaactgaatgggccatcagagcctatggtggcctggaaatcacacacccggaggccaagggtgcagctgctacccagacctaggtgaatgctgggccccatgctgccagtgtagagaagttgggaatctatacttttttaaatgtttggtttaattttaattttttttgtttttagagatgggatcccactgtgttgcctagagtgaagtggtgcaatcatagctcactacagctttagactcctgggctcaaagtgatcctcccgcctcagcctcccaagttgctaggactagaagcatgggccgccacaccagaagaaaactagactttcatgtgggctctaatttttctgttggcatccagtttctaaaaaacgtagtaccaagcacagtgcctgaatctgtaattccaacactttgggaggccaaggcgggcagatcacctgaggtcaggagttcgagaccagcctcaattaggagaaaccccgtctctactaaaaatacaaaattagccgggcgtggtggtgcatgcctataatcccagctacttgggaagctgaggcaggagaattgcttgaacctgggaggcagaggctgcagtgagccgagattgtgtcattgcactccagcctgggcaacaagagcgaaactctgtctcaaaaaaaaaaaaaaacaaagaagtacttcaaatgtattatctcactactctatgatatgttgtaagattggccccatttttacaaatgaggaaactgaggctcagagacattaagtaatttgcccaaggtaacacagctaaaaaggggcagagccaggattggctactacaaagtccttattccttctctccacaacattttattaagaaaatttcaaacaaggccgagtgtagtggcccaggtggctcatgcctgtaatcccagcactttgggaggccaagacgggtggatcacctgaggtcaggagttcaagaccagcctgaccaacatggtgaaaccccatctccactaaaaatacaaaaattagccggggtgatggtgcatgcctgtggtcccagctactcgggaggctgaaacaggagaatgacttgaacccgggaggccgaggccgagcccagatcatgccactgcactccagcctgggcgacagagcgagactctctcaaaaaaagaaagaaaagaaaagagaagagaagagaagagaagagaagagaagagaagagaagagaagagaagagaagagaaaagagaagagaagaaaagaaaagagaagagaagattccaaacatacaacaggttgaaaggatttcacagacaatacctgtatcccatcacctagattataccataaacattaaattttactgtattgctctatcacaaatctatccaaagattgtctcctttggttccatctgaaaagcaacctagaaagtacgttagaggtggagcccagatgttgccatttctgaattagaaataatttggcctcttctgaaacccactcatcccattccctttgtggctggggagtatgggggtgggaagggggcaggcaggaaggagagtgttgatccaggaacatctgcacacatcatcacaacacacatcccaaccagctctgatttctcccctggctcaaagcagggagagatgggtatttgggaaaagctcaccaccccaaaatatctccctaaaccctgaaggctaagtcaacccatgggctctctgaaagtggccaggggacagcaggagaggcagtactcggaaaagggcagcggtacctatcttcggagccctttcacctgctccagtgggattttattctcactctgtggccctgatacctcctgtgtcttttagctgcattcgtgggatgggagggttgtcagggaggtttcccacctggggcctcttcgtacacctcaaggggataccatgcccacagaatgcaatgtgaatggtcctcctggagtcctgcagagtggtggcaatcttcaagtccatctgattcatgcaaaagttgttcgagcataaacagcagctttctccagtgtcccacgcacagtaaagaccctgcaagagggctgcctatgaaaggccttggggccagggcgggggctgggagtgctggactctcaattctgacaccatagcttctccaccacttcttgctatgtgaccttaagaaaccttcctatcctctctgggtcagagctttacaaatgacgccacaccaaaggaaaaaaaacaagcaaattctggccatctcctatgttcaagacagtgggccagatgctgggtggaggggaaagaggcatactaaggagctcagcagatacctcagagccctggtctaagcgctttgcacgtttttaatactgacatcaactctacaaggtgggtgtgacttttatccacattctataggtgagaaaactcaggaggagagaaattaaaactttcctaaggccacagggttaagtaagaggcagagcaagggtgaaacatgggcaacagtttcagaagcctgcacaggtgaccaccacaaaacgctgcttgctagagaagcccaagaccccctctctgacctccaggaagactcggtccaggggagggagcaagacaaaagtgaagatttaaatgctgataaaatatttaaataattctttgagataatagtgggaaagatgctgccagggagaacatgattaattgtcaaatgaaagtgttcagacaaaattgctctaacggtccagaaaaggggaggaaaaaaacccctctaccgtgagctcattctgagttggaggaagcctgggaggttaaatgtcactggcttttgcagagtgagcaggacttgaacaggagagagtagggcagaaagcattccagcaagaatcaaaattctttttttgtttttgtttttgtttttgagacagagtctcattctgtcgcccaggctggagtgcagtggcacgatcttggctcactgcaagctccgcctcccgggttcacgccattctcctgcctcagccctccgagtggctgggactgcaggcgccagccaccatgcctggctaattttttctgtttttttttcagtagagacggggtttcaccgtgttggccagggtggtctcgatctcctgacctcgtgatccaccttccttgacctcccaaagtgctgggattacaggcgtgagccaccgcgcccggccaagaatcaaaattcaaagggccagctctcatgtttggaaaggtgaagggccctgaacgactgaagatggctcaggggtgcaggaagggtgagctgaggctgggtctgaactttgccttataagtaatagggagtcatagaggaatttcagtagagtagaggagcatcatgacccaaatgtctgctgatgacacactggatacactaggggtgcagggagaaaattaataaattccccaaagtgttggccaaggagtccttgggtcttgacagaggaaagcaagaagttaaggtcatgatactcctcagagactgaccaaagaaggaagaagggggatacttcagctggaagtcttcagctgggttccatcctaaggactttagaatttggcactctgcgtcatcagggaagcaagtaaatatgatccaaagtccccccaccccctcgcagggttatatccagagaacagaattttttaatgctatttttaatctttctgttgaccaaaaacacactgagaagaaatgaagcatgaacatcaacaagaggctctacaaactctctcccctctcttccctcctgttaaccactctgcgaccctgcagactcaccatatggtccaccagctagatggccccttctgatcctggaagggctgatccgcttaattatttggcagctataaatagaagcattggacaatagcctgagatcttttttttttcttctttttttggtcttgcaaacaaagagagggtccctagttggcaggattggagagtaggatttcactccctccctccaggccattgtcttccacctgagccaccacagcctcagggcggcttcagaactgtcctggatgagctagggacagccctgtctcaactgcgccagcaaggagatgtgctggggtcactcacagttcttagagtcagggtgggttttaggaaagagatcacccaggagactcgaaaggtccgtttgctttaggcatgtccttgcctatggggccaagacctcactctagccacccacagcttttcctaccttaccactcactgcacccacattcagccttcactctcacccccaccccattcccaggcgagagcagccacctggaggaatggactcctctggatccagagccaggaggtgagcagagcaaatgttcccagtgcctgcaggaggaagccaggcacccagggttccccttgccacctagacccccgccacctccccatctaggatgggctttctctactccacacataagcactctcctgccccagctcctaagctgttctccctacccctaatcttagcagggacctggcatggaagtcagatgagcctggcttggcctcttgggtctgctactttactagttgtaagatcatgggcaagaggtttcattgctcagtgcctcagcttccccacctgtacaatgggcacaataacgatactgacctctagggactgcttatgaggacctatcgagagagcaggtaaaggttgtcatctagagcctggcacacagcaagtgcttgctaaggggtgttactggcagcttttctctgagtccaactcccatcacctatatgcatgggactcagcacacatttgctaagttgttggtttctccacgctcccctcctcctccttcacacccaagaggaatgaccaggtggccacaggagtcagcatgtttgactttggtacctggggctcctgaccatccagtgtgaatccaaacgcatttccctgactgtctgacacctgctgtttaatctccatcaccttccctcctcctacctggctcagggtccctcactccgcataggtggccaaggtgtgggggagagccctccttcctaatgcttgtttgttttttcgctcatgtgtttgctcagagacaggataccatggtgacacccacgatccagggtggctgggtacacacacatagacagggaaatcaagtgaaagaaaaagcccatgggggccaccatcatcccacgaggggccagactggctcccaaaagagggggaaaggctgtccctcccaggggcctacatatgttttcccaatggaaagcttttctcagtggtcccggcaggcttccaggacactcctgcaggccagggactggtttctgtttgtctagaagccctgcattcatggtctagcatagccaccaacctccttgagatccatcactatccccccatcatgggcatctgcagagcattcatgggttgtggtcatgacttggaaaattattcttaggctgggagtatggctggactaggcttcacagagaacacggagggcagggtgagacgctgccagttggagagaatggcagcccctcatgaagttcagagaccccagcacacgaggaatctaccctgcctggcactgcattggctctcgtggaacatggagggagtgggctttggaatcagaggccagggatcaattcctagctgtgccacttcctagctaggtcaactgtgctgtttcctttaacctttctgagccaaattatttctaattcagaaatggcaacatctgagctccacctctaaagtgctttctaggttgcttttcaaatggaaccaaaggagacaatctttggatagatttgtgataaagaaatactgaatgctaaaatgaaaataaaaatatcttctgcagaaataagacctagagtttgatagatcagtagggtgactatagtttagaaaatattatatatttcaaagtagctagaagagaataattcaaaggtttctagcataaagacaaatatttaatatgatagatatcccaataaccctgatttgacctttacaaattatatgactatattaaatatcacatgtacatatgtacatttattatttatcagtaaaaataaaattaaaattataaaagggagagagacttcctgcatatgaaatagagattacaaatcctttctaagtacacatgggatactgacctgtatgctaagtcattaaaaaaagaaatccttctgcaaaggaccgttttgagactatgaggctctaatttagaaaggtgacaagcacattgcaggaccttacttaatagggctggggcttgccagcatacaaaattactgcagtgacttgttcagactcctgcactgggaaaagacttagtccagagacttacccaatgttttgccatagtaaattctccaaggatgaagaaaggaggaggagagaaagagaacttttctctgtcttcttcaaaagctgtagcagccagatgaagtacggtgtaggtggccaagcagccagatccctaaatagcaactaatgactttgattgaaattaataatgaaacgacacctgttagctcacttgtagccactttagtttgtcacatggcaattatattcactatcctatcagctggtccatgagctgtaaaatgctataatgccatgccatatgcctctcttgtctcccatgttgagacgggggctgtcctcagggtggttatcaattccaggcctcctaaccactctggagattgtcctgggaacttccccggcattcaaaaagacttgaggaccaccagccccagtgaacctgctgagtcccagggagcagctgggcagcctctttgaaggtggattcccccaccgagcaagaggaaaaacacacccaagagttaccgagtcccttctgtggttgggtccttgaaaagccttgttgggtgatagagggaattctccacttgagcagtgaacaacagtgtcaccatccacattatctccccagacagaggcaggacataaagaactaaacaggcccccagcaggccatgagatttggtttctatagcaacccaactgaggttgcatgagtgcctatgagatagatgcccaaggctcaccccagacagggccagaattccagaatcccaacggcaaggaccacccagcagcgtttagagatggaaagcaaggtttgttcatgttcagaaaaacccagggaagccacaggaaaaaaatggggctaggatccccactttctataaggcaagctccaagactatctggcagcccaaagctggcatgcagagctgaggcaggccccacaggtgagctgagccacgctggggattttaacagaaaataatcctccatccacctctgcatcgtccatattctctctctctctctctcacacgcacatacacagacacacacacacacacacacacacacacacatatgaaaaataaaaaaaatcttgcaattattcaaaagaaactatggttgatttgttgatcagaaaaatatcaatgaatgaccaattgcaacaaggtccaaggtcctttaatgaaagtttctaattaaccctacctttgaacacttctattactctatctgtagagtaattgttattttagcgatgcaatgtttcctaataagaccaagcattgggagaaagggaggaagggagggacctgaaacccaaacccagccccaggtacaagctagcacaattagcagccagtgtactggcttctcgaatgctgatatggaatagctcaggaaactcaatcccaccagggacctgcttactgtccacagatgtcatcacagtcatcggtcaagctgagagaggctagcgcaaacaggcgatggggccgctctatctctcctcctccatcaaatcacaaaatgccatgacaacacccaagccagggcctctgaggacacatgaaaggaaatccaacttcatgcaacagggactcaaggtatggcccttttcggccaaaaggcagtgtgggctggagagagagataaacacaagaggctggaaacacagacagggtgagtgggaaagcttagaaggcacttagcaggtaaggctggcatcgggagggagctggctggaccctaatccctgaaacctctctccctgaaacctctcttcaaagagatctacactttctaaatcctgcctccatgagatgaaacttctgttcggtgtcccactcttacagcccctgattcccccagggcctagctaaggaggcccttggaccaccagtgaaactaaacagagtcactgcctatgaagtcccttcagtctggagctgtctgaggaaacagataagccatccaggccaaagaccagcctttcaccatctgaggggctattagatgcccagcaaatatgggttgcctagctggtagcttctggcccagatgccagtccaagagctagagtggcctctccaagcttgggagttagggaagctgtacccagatccttggcacccaccccaaaagagcccatgaagagaaatgaatgaaagggcccagggagattctcaaggccccggtcagccgccctagaagtcacctcaatcttagtcaaggatgagctgagccttgaaaatccatactctgtgcaagaagatgcagataatctgcccagttgcccaaggcaataacttggaggacaaccaacaaaggccaatgggggtcacttgggaagacacatccctaagttgacctgacttccttagagtgggcaggaaagacaggcttcagaagatagctagaaagtaacaccagagaaggtcaccctagaggtggcccctggccatttctcaaggtgacagcctctctgcccaggcgtccacactgcaatgttttccatattggcacttccttacaaagtcctctctttctacctccatacctttgttcacactgttttgcttagctggcaagttcttcctgctcctctctgcctaccaaagccccacttgcccttcagggtcaggtcaaactcaagctcctcatcaagctctgcatgccatggagatgtgctgcccccaacctcacctcgaagaaggacttgaggcccagcttcagggagacggctttgcaaacagcccccagctgtcggttccttcaggctcagcctcagctacagcttcagccaaggtcacccttcctgggacagcctgcatctggtgacagagtgaggtggggtacagaagcacagcaatttgggcccaaagggatcatctctgttggataaatccactccagagttgtctgctgggttggccgaggttttgtggaagctgcatcagctctcgacttgtccctcttgtcactctggcctctgcctctcccttctcagaggtggattcctaataaacatcatgagctcaaactggtctccaccagtacccatctcccaccagaaattcaatcaatggtcattattattatagcccatgtttctgccacaaaaggtgctcaataaacctttgataaacacatgagataatttagcatttctacttgctgacggagctcttgcagagcctgccactctttcaggcacactcacagcagctgctgatcaggtagaccaaatgacatgaggccaatgaaataaatatgccatcacaagagcatggcttcctctggctccctaggaatcacacagcatgctggctcctgaagaacacacaaggagatgcctcacctgagaggttttggatcctgggatcaagaacaggggctcattggtacctctgtgtccatcctaaatgatggctcacttaagaagtgatggaaggtcagctttagtgacaccttctcatcagcaatgctgctactaggtgccaacagcatctctcaccacggcactttaatcaggatggcatgacaccactgtaaatattaaaaaggttataattagagacgcagttaaaacaaccgagggcttagtgttactaaagatatttgcagaatctggtgcaatataaatagcagggtttacggtgtcatgcctaaaattttgagcaggctgatgttccaaggggatgttcagtgaatgcccatccaagctgggatttctctcaactgattgttttctctccagtgtcagagttctcagaaatagatatccagagtgtgcccattctcataaaggggtgaaaagaccttgctactcaaaaagtaggacaaccttgcaccaggacacccgttgaagctcggtggggcagctgcagcccctcaagctgctagaaacactgtctcctgcatggagaggtcacagccttgtgattccatcggctccaaatttaaagcaatcttgcagaaaagggccaacatttatcagaatgaggaaattgttttctagggtgatatcaactggagtctgctgggtacacatgacacagagaacaggcaatcaacctaccaacaaagacgataattgtcacagtgcctgccaccggccaggcctctgcacacattcactttttcctcaccacaatcttacaaggctattgttgacatagtcactttacatatgagacaatcaagactcgcaacatcataaaactgatcagcagcgacatctaaatttgaattcaggtctgtccaattccagggttctttcagatgtgagaagggaggttcagaaagggcccctttttcttctccctccgtgtacttctgtattatttgaaatttttatcaatagtatattttcttgtattactttttaaatcttcaaatcatcaaaaagaatttatgggcaagagaaatggtcctatttctgttgaaaatgtatcttaatttgatgtaacaaaatactactaacaggccgggtgcagtgctcatgcctgtaatcccagcactttgggaggccaaggcgggcagattacgaggtcaggagatcgagaccagccagactaacatggtgaaaccccgtctctactaaaaatacaaaaattagccaggcgtagtggtgcatgcctgtaatcccagctactcatgaggctgatgcaggagaatcgcttgaatccaggaggtggaggttgcagtgagccgagatcgcatcactgcactccagcctgggcaacagagcaagactccgaaaaaaaaaaaaaattacaaacagccattgaaataaaaaaaaatctgttctttgctacaataatttcatttctggaaacctatcctgaaaaaaataagcagagacaccaaattatattaaataaaaaagctgcctttattttgaagtgttacctttaataagaaataaactggcaagaaactcgacacccaacaacagaaaataaagactggatatcctcatgataaactagggtgatgctattaaaaatagttttgaaatgtcagcaaccacaaggggaaatgctcattacatgtttctaggtttaagaatcaataaataaactaagtattcacacatgtaaatgctggtatatgcatccctcccaggacccacaggcatacaaaggaatttagaaagagtagacatctttggagagaggtttccaggattagggtgggtggggtagggtgggcagaaaacttttacttttcattttatatttttataagttatttcaatgtttaccatatgtgttacttttatttcatttcactttttcaattttttttttaatttttaattttttttttttttttgagacggagtctcactttgtcgcccaggctggagtgcagtggcgggatgtcagcccactgcaagctccacctcccgggttcacaccattctcctgcctcagcctcccgagtagctgggactacaggcacccaccaccatgcccagctaattttttgtatttttagtagagacggggtttcactgtgttagccaggatggtcttgatctcctgacctcatgatccacctgcctcggcctcccaaagtgctgggattacaggtgtgagccaccacgcctggcctatttatttatttttaatttaaaatagagaatgtgtctcactctgtcacccaggctagagtgcagtggtgcaatcacagcccactgcagcctccaactcctgggctcaagtggtcctccaccatgcctggctttattattcatttatttatttatttgagacacagtgcagtggcacgatcttggctcacttcaacctttgtctcccaggttcaagtgattctcctaattcagtctcccgagtagctgggattacaggtgcccgctaccatgcctggctaacttttgcatttttagtagagatggggttttgccatgttggccaggttggtctcgaactcctgccctgaggtgatccacctgcctcggcctcccaaagtgctgggagtacaggcgtgagccgctgtacccagatttattttttaaactaagtatattttaaagctttacatatattatgtatattaaccaatatacatattaacatttatatatattaaccaatctaagttttcagaataacatttcattatataataataaaatacacccaaatgtgatttctgcattgcagaattacagacattgctttctctttataatttttctgtatttgccaagttttctcccataaaagcataattttattatcataaaaagcctccttttcaaaactttaaggtatctcactagtaagaggatatactttctctaataagagtttgggtttcaccaccagtcatgtccagcctcagacccacccaaagagtcatactatcatgagtacaggggatagaagggccccatgagactcattccaggaggttaccaaagtagtagacctgaaatggtttggctctgtgtccccactcaaatctcctcttgaattgtaataattcccatgtgttgtaggagggacccagtcaggggtaacagaatgatgggggcatgtttttcccatactgttctcattatagtgaataggtctcatgagatctgatggttttattaaggggagttcccctgcacatgccttcttacctgctgccatgtaagatgtgactttgctcctcatttaccttctgccatgattgtgaggcttccccagccatgtggaactgtgagtccattaaacctctttcctttggaaactacccagtctcaggtatgtctttactagcagcatgagaacagaataatacaagacacaagccctactggcttagcctagagcctcagctgaagccacagccctcagccctggacccctgagatacaagaggagcctgaccagtgacatcccggaattaaacagggggagaatcttcctcttattgtcatcctgagcaatacactagacaaaggccatcgggcagataaaaagaggaaccctgtgcccctgaagttgatctgaccaccagcgagaggtcacatctgctatgtgcaatgccctgcaggggtcacaaagatgacttcaacctcgaccctgtcttcaaaggagagtccagtccaggcgagtaggtgagaaggcatgtaccaactcaaatcccaggtagaaagtgagcagagcccgaactacagaggtatgaatacagggcaattgaagttcagaggacgaaagctcgcttccagcctagggtgcaaggacagcttccaaaggaggtgattcacaaactgagtttgaagtctaggtgtattcaaatacaggccaagtgtgcccctgcccaggagtaggcagtctatgcaacatgtgaatcacatgttcaagcacctgcctcacctgttttatgggcaagtctgccagctacagtcctatcagggcacctatatttctaaggacctggatgcctggatgttttttctccccagggcatatatctcaattacaaacctgcaggaaacaaaaagtttgtggagagtcacaaaacatatttgaaatgtataagactttcaccacaggaaactaggcctaacaagtattttcctgtggaacacccctggctttgatgaaactccccattcaatgtctctttcctcctgcaaactttgctaatagcagtgaaaataaaagcacagatcctatatttacttaatgatcttggctgctttagacatgagatagcattccaagagagcaaagtgctttttaacaaaattcaacaagaccctgccctttcccccgccctcccacctggcctctggaaggaggaaggaatttctcattctctgatcttttcgcctgccatgacccccagggcaatccagacagtaagactggccatgcctcctggtcatgtcccatacctcatgtcctcatgtgagaccccagatgggggagatgatcacatttgagttacatttgaggcggagattcaggtgggggcccaaaacatggctgacatccagccagcattctttgctagatggagctgggaatggggggttaacttttgtgaaagtttattagagaataaagtaagtgagttaattaaattggagtgtgaaagacatttgggtggtgatgaggaggcgaggtgatgatttatttataattgacaaggttgcatctagctactgggatagtaattatacactttataaatgcgcaaaaaaagtcctttcatgcgatggaggtttaagggaaaatcctgtcagggaagtttctgtctgcccatgagtatgacaccacctcaagagctgttggccacttggcttctgccaaccacagctgtaagttggggactgaataatctctaaatacccttctaaaaatgaggccttttctgggaatcagtacttagcctccatctgcttctgatgatgttttcttatctcaattcagggacaaagagggatcctttatcttgtgtctgattctttgtttttgttttactgattcatattcaagttccagctcttggatcctccctaatcaagatgataagaaagatgctgcccaatgcggcatctcatttaagggtgagcagatgtgaattcagaccctaaatttgggaaagttccttaatctcatctggaaaacagggatgggggtacctagctgacggggttgctataaggacagaacctggtgtaaaggcaagcctggtacccagttaacactcattatcatgcaccttaggttaagtcatggtaaaggaaacgtttcaggttaacttcagtcccttgataactggggattccagcctgacctgtttgcatagagtctagcttggcccctgtgaccagcatttgcctctctaagggctcctaagcactcagttttaaaatccaatcaagagtatttccagagataagccacgacatcattagaatacagattacagcatccatcttctgacacccactgagaaattctaacaagcacaagaagttccagaatgctagaggtaaaaaataaataaatataaataaataaataaataaataaataatcttatctcaccattcaaagattctccaaagaagtagcatggactagatctctcctcccacctgaaacaactaaaaattcagacaagacaatgattttcagacactggagctcagtcaggggaagacagcaatccctgagagaggagaaacgaagtgagccctacagttgcctcaacttcctgtctggagagagcgtccaagtcacagcagaaagaaggaggaccccagcagggcccagatgtctccctgagttgaggagatgaaggctggattccagcaaggccaaggaggctggaattcacaggccagggcagcaaaaagaactgcccagtgaatacttgaggtcagcagagggacccccttgagtctttagctaagtattggtggacacaggcatgtgtgaaagctatccaaggtgggggagagaaacaccctaaaggagcagacagaacatttcccagagtttatacagggctgggaacggttcaccttcccaccagccagagtggaaacctcaagctcacagagcacctggtagagtactgagaatagcagcgtctctgtagtgggaaaaaattagccctagattaagagagctctggttccacctaataaagctcaaaggcaagacccaaaaaagatcaaactgtttccatacaacttgatcatgtcccagaaaataagctcaagaatgttttataggagtactaagatatccagcaaccaacaaggtaaaattcacaatgtctggtatccaatcaaaaactaccaggcattcaaaaaggcaaaaaaattgaacccataatgaaaaaatagtccatcaaaagactccccacttctgcaaccacatctacagtgtatttcaggacccagccatagagcccctctggtcctagaaatgcatttcaaagtgcctctctagctctgtgcaagagattttctctttttcattctaaagacagtaatcctaggtagaaacaagagagagaaaaaaaacagaaatgctcactttctagtttgtttctctgtttgctaacagtgtcacatttcccaagcagtgatactctcccatctcgttcatcttctaattctctgcctataattttacaaatgtctgtggctatctttagcagttttcaccagttttgtgttttagccacctgaccccctttcactctaccctaagttagatgactcctcattcctcattcataaagttctgtctgttaaacctagagttgatcagcgatcacgatacacgaacatgctctcttcttcagatgccctcacattttccttctttacttggggattaacaatttaatttttaattagtggagcatactcaaaatgtcatggttgcagccttccatcactcttgggctatattctctcttaaggtcttcatatggactgctgtctaaaacaatctagaagagcaagaaatccaaaaatgggcccaagtatcctagggctgtggatccaaggcatccatccaatgtgaactagataaactgcagtctgtctgcaccattgatctttctgagatgagggcacctgaaagagtgggccaagccactagaaccctggaccctccaccacaggtaccttgtggcagttggctttaacttcctccctatccttgccatattaatcttcattccctgtagtcataaagttctagaagaatatatcagctttgatctctttcagttattcatgcattctttcatttaagtaaacagatatttactgagtacctaccatgtgcttggcaatactttccaatcttcagaaccgggctctcacaccaagcccaagcacaggcagctacccttactcctactcaaaaatgtgaagaggctgaggcttctaaaatagaaaaagtcaccagctcagggtcaaataattaatggaactcgaacccaggactcctagacccaagcctctcctggccaagtctcattcactgcaatcacaggtccagcctggtcacgatgatgagtgggactgtaccctgccctccctgcccagcccattctaggcttcctcagaattccctactttgagtgctcctttgccatgtgaggctcagtgatttccttctccgagtccactcacatttgataggctcctatgaaatgtaggtgagcttcacctgaatctgcacctgtcctcattgctaaggtgatgagctagtgtcaagaaaggctgagggatccaaggatgaactcaggcagggcttgaggccactactcccggttcccctcctctcttccccatgaatcaccttcaaggacacttccatcaaacctgactcacacagaaggcccagacctgagaaatgaccagcccctgggccagagcagagagccagaaggcaattccctcccccatcactgctgcactgggtggaaattgggtcagagctggccagcccattcatttaatccaaacgccccctttccattcagctcttagtcctcagagctttcagtccaaggaagcactatttcctctgcaaaataaacaaaataaattaagcccatgctctttgatctcagggcttttgtgtggctgatgaattgaacagaaatgatctgccatcctcctggcatctcaaagacactgcaaaaattcagctgtagcttccagccacctgccaggcactgtgctgacaaggaagcatggctaaggaaggcactctttgccacccattctcccagggaagcaagaagagtctgcaggaggcacgacaggggaagtcaaaagagtcaaagactgtgaggcaggattcgtctttggccacataggcatggattcttcttcctctgctcattcccaccccagggactttgcactggcttttgtccccatgtggcatactttctctggagaccttggaaagctggctccttctcatccttctcatgtcagcttgcacaggacctccggagagaaacctttcccatcaaaagtagcccccagactctacccgcatcactgtctgccagccccctactctattatctccacacttatcataatcagaaatgaccttgttgctgcatttgttctcttgtttgttttctgtttccacttctacctccgtgacagcagggacatcatctatcttgatcagtgccatatccccggcagttagcaaaacgtctggcatatggcaggtgcaaggcaaatgtttgctgaaggagggaggctgcatggaggagactgggccctctttccagtgccagctctgcctgcatcgagcactatgtggcgcatctagaccaggatccacatccatggtgtggtttccccaggctgcagaagtgcactgtggaagcaggtctgtgtgcttgagatcagggaaagctgaccaagaagatgggacacagttgattctggagaggcagggaacagacaggggactctcctaacaggctggatcttccaggacagttgaaggacaacatccagtaggaccctagaccaagagtatagacactgtcgctatgggtgtttctctgagccctgagacttcccatgtttaagataagctggttggattactggttattgattatgttgaatcttttggtggcacagaccaacttgagaatctgaagatatcaactttctttctggagaaatgcatgtgcttacatagagacaaaatatgcctgcacttcctagaagggcaaggacccctccgaagttcattcacagccccaggatgacagcctctcacttaaaggctcttgggccgccctgctagtcattggcctgcttgctctgagacccagtctttacccctcgtctgtagactgtggactacactccccaggctccctcgctctttcttctagggaagtttgttctattcagcaggaatgcaggcagaagtctgcagggtgggggcaggcagaaaccaggacatttctccctccttctgcatttggtggcatctccagatagagaacatgtccatcattatatctatcacctctgggtatcctgccctccccagagtcctttcctctgtgatcctgcccagcccagcaggccttctgtagttccagcatccgccaggtgctgctggatcctgagttctagaaaaccagctcctcccttccccctctagccctaggatgctagcagcttcctgccattgctattctctgggctgcctctccattttttgcttggctttttatctccttggacacctttataactagttccccatataaactccttctactagatattttggcatgaactctgggtttcctctggggtccctggtgggatcagcctccctccagcacgggcattctgagagcctggtagcttcctggaaaggccaatctgagctgaattaacaaatccctaggaaggtcaagaagatggaggggctgggaaaacccatgttgcctgcgagtgcagtgcctccatcctgtctggttccattccaggaaaaaaagttatataggaaaagcctcacaatcgcaatgtagttaaaaactgtttactgcctttttctaaatgagggaaacaaatgtaaggcccagagcagcctcccatcaaatcatgctcttgctcagatcaaacggcagcccgagtgaatattcctagagttcctacttgggagctcacgctagctactaagtcctccctgccaaaaagacccgattatacaaagtggggcagcaggaaagccagtcttgtagcatcaaagaaacacactgtctgaattccatcagccacaagcaggcatcctccacccagggataatgcagccagggcactgtgccccagaatggccccacccatgcaggagggcaccttccctcctcactgtgctggcttcttttaacaaatagccctatctatgagctcccttgttccttccaaccattctaaagatagggcaggcaccaaggccaggggtatgggcaggtcctcctccctgaggaccaaggcacagagagtttccaaggccacacagccacttggaagcagagctgggattagaaccctgcctggacagggaatgacttcaacttacacacatgaacaaacacgaatctcaactccctgttatggtggggttccccagacacacatgcatggtagagatttcagtgcaaatttaatcatttgaaaatactgacattcaaccattttttaacctcaaaaatggcaatttcatgtggcttacatgaatagtttatttgggtagtgatcccaggggagaaccagctggggagtggggaaataaaatgggaaagtgagagggcagggtttgttaatggtcaggacactgctgcagacaaccaaggctcaatgccactggagacctctgggagatggggcagaaccaccctgtccaacatggaaggcaccagccacattgagctatctacatttaaattacttgaattgaaaaacttagttcctcagtccactagccaaattccaaaagctcaataaccacagatggctggtggctatcatattggacagcacacatacagaacatttccatcattacagaaaatcataggggtagcactggcatagaccatgcctcagagctgtgtcatctgaggggtagaatctggggtatttatactcccattagggtctatcattggcaagggctgcacctgggggtatttgctgcaggcacttccagatgtcttggctcacactggtagggggagggaaggcactgacagtaggggcatttgagtgggataggaatagagtggcctgggggcatgggcagggcattcacagcctctgccacaatcaccagcccttcctgcacatcacctctgctcttgttgaagcacctctggatgcaggcattttgacagcttcttcgcaatgggaatgtggccccagaatcctctgacctgatgacaagccattctccctggagacaacacacagagagagacacaatccaggccttccaagcatttgtgatctacagcaggcagctgggacacagaccacagcatgcagcaactatacaaacactgactaataagctaaaatcggaaatctttatggagaaacccttgtgagcagtgcctggctaacagcatgtaggtgttgcctccaagaactgtctagcatttgagagacacagttggagactgagcgtccccattaggcaggctggtccccgaatacccacattattgtggtaatcaaaacacagctttgagacatcactgtgctggtcacaaacctggcaaggtcaagaaagtgctctgaagaccagcacccaaaatcttcacagcttagccttcctcccaggggcccgctcttggcatagcacagtggccagaacacagactctctggagcccactgcctgaggtcatgtctcatctcctccttcctcactgcgtggccttaggcgcactatttgatctctctgagcctgcatttcctcatctataaagtggacacaataacaataactttccaatatggttgtcaagaaaattaaatgagcccatgcttttaaagatcttataagaaggatggcaaactttttccataaagagccagatagcaaatattctatggcattgcaggtcacacagactctcacaacctctcacttcggtccttgtagctccaaaccagccataggcaatatgtaaacaaatggatgttccaataaaactttatttataaaatcaggtagtgagccagatttgccctgcaggccatagtttactaacccctatcttagaatgattcctgctctacagtgagtgctatatgaatgttcgttgataaagtctgctgcgctctcccacctctcagattcttcctgtattattattctctctgcctccctctccacccatcctttaagaccaagctcaagtagccttcctgaaacagtgtggagatttctcaaagagctcaaaatagaactactattcaatctagcaaccccactaatgagtatctaccgaaaggaaatcattagaccaaaaaaacacctgcactcatgtttattgcagcactactcacattagcaaagtcgtggaatcaacctaagtgtccatcaatggatggctggataaagaaaatgtggtacacacgtgcacacacacacacacacacacacacgcacaccatggaatattactcagccttagaaaaaaaatgaaatcatgtcttttgcagcaacacagagggaactggaggccgttatcctaagtgaactaactcagaaacaaagtcagacagaaagtgatgggtacactaaaagcccatgttgtcacttataagtgggagctaaactgagtacacatggacatacagaatggaataataatactggagactccaaaaagtgggacggtgagggggtgtgggataaaaaattacctattgggctgggcatggtggttcaagcctgtaatcccagcactctgggaggccgaggtgggcggatcacctgaggtcaagagttcaagaccagccttgccaacacggtgaaaccccatctctactaaaaatacaaaaattagctgggcgtggtggcatgccactgtaatcccagctccttgggaggctgaggcaggagaattacttgaacacgggaggcagaggttgcagtaagccaagatcacaccattgcactccagcctgggtaacaagagtgaaactctgtctcaagaaaaaaaaaaattacctattggatacaatgtacactatttgggtgatgggtgcactaaaagcccagactttaccactacacaatatatccatgtaacaaaaccgcacttgtactccctcttttttttttttcaaaaaagaggcctccctggaccctccctcttttcttagccacatccttagaccacttccaagttgctcttctgtggtgacccttgccccaccctgctatttgtggggcaacttgtttcgctgtagaatttcattgttcctgttaaatgatgagatgatccaatgtcttcattttacagggagggaagcaaggcccagagaagccaagcgacttattcaaggtcacacagtgacggcagagtcaggaccagacatggatgtgtcttgattcatgattcagtacagtcttgggcttaaggagatttcaatactgaggagagtggggacacagatcacccagccttctacccttgatttagggctggactaggtcacccctccacagaggttccttacttcctgcctcagcacccctccaggcagaacacttacggggcttgttgccccaactagacaggtctggctcacttctgagtctgtcacatatccagcatgggcccaggcacgctccagatgcaatagtgttgaccctgtgtgctttgtcttcctcttccttccccgtgagtctgcccattgccccggggacacccaggacagactcacagatcttccccaggggacatgtcctgttcatgcctatctaagtcatcaaaggcaaattccagagcagcctatagccagggctgtgtggggactccccactgactatggggcttcacagaggcacagcccaaagtaccatgctcacagacacacaaattcagacacacacatgcacacacacacacaagcagacacatgcacacactaatataaacaacacagacacacatacacatacacacggacacggacacacacagaaacatgcacacactaacataaacacatacatgcacacacatacacgcatgcacacaatgaaacaggcacacagacacatgcacactaacataaatacacacagcacatatactcagatagatgcacacacctaaacacaaatatacacatgtatacccacactgatgctaacacatacacacatgagcacacacacacatacacagaaacatatatacacttaaatacatatatgcatggagaaacaaatgcatacatgtgcacacacacacttagacgtaaaaacacatatatttacaaacaaacacaaatgtatgcactcaaatagacatataaatacacatgcatacacacagacatgtaaacatacatacacgtaaacatacacacatctatagatgctcatgtgctcacagagacccttatatacctatgcacacatggataaacacacacaccctcacacatgcacttacacactgtgtgatgtttttagcttttacctttacagacagacatgggagctttccctggaagatgtaaggtccctgggaaagggactgtgccctgggctctcccccgggagagagtcccgcccacccacagcatctgcctggtgtcttgaacacaactagtgctcacgtttcctcaatggacggatgaatgaagtcgtctcatgcctgggccttgggtccatggggagagcttggctcaggaagccggtgctgcctctatcacctctgagtttccaagccatactctctcaccccatcccagcttgggaaacagccagcatcttgctggcctcttggtggagtgttgctgatccatgcctctgccagaggtgggagaaacctcgatgaaactcaaaccaagtcttgacttatctagggatggctgaaggtcctcctggggtggggagaaggtggaagaaaccactgactaaagtggtcctggccccattctcccagcatgtaggttttctggctggactttacaagtaaaaaccacagtgaggagctcacttctacctgaggtaacacagtgcatggcccccacctgcttcccttcatatcactatcttgcaaaactggctcagagagagcctcctggccctgcgtagcctgggaagataccacccaccatcatttgttacctccccacagtgggaaggtgaagggcttaggagacctgcttcttggcaccatcacactgtactgtgttgtcaccctatctggacctcagtgtttcctctgcttctataaaacggggtgaataacctttgcctcctaaataccaaggatacagcatcaaggagaaaggactctgacctcacaggaggtgggaccaaggagaggggcaactcacaaaagcctgaggaagaacattctttggtggcacctccctgatgagcagagaggagccgctctgcaagttaagtaattgatggagcacacgctaaaaatacaaactaggttagcactcagggtggtttattgctccaagagggagttaattcaggcactcaaatctccatggaacagggactgtgagcccagagcagcagactcctgagccaggaggcctcatgcaacccagctgagaagtgctgtttacttaaaggctgagcaagacggaaccagagaaaatgggctggggaagcatagggggtggcagagaagggagtgcccaggccttaggagcatgagggaaagaaaggaggcaacatgcaaattagtaacaggaagtgggacaggcgacaggagctggaagggctactccctcctagattgggctgcaaagaccccagcctcccagctttctggagccccttgctattccaagtaagctccagagaccagcggcatctgcatcaccagggctctcatcagaaaaacagaatctcagaccccaccctagacctcccgaatatacattgccacaagatcctcagatttcctgtgcacactaaagtttgagaagcacaagattaggagtcaaaatccctgagttcctggtccagctattgctatcaaattgctgtgtggttttgcaggacttgcttgacctctctgggtgctagaatttcttcctctgggctacaggatgagtgaggcttgtttctttctcctgggttctgagaggctcaagtcagacccttcatctgcaggcctcggaagcatgggagggcctttacagaaaaacgtttccattttctaccaggctgcccccttccgctttcttggagtcattagtacacagagaggtagatggggagatgatccttgaaggacacactgcagtcaggaagaagacttcttaatgtcattttaagccttgatatctctccattaaaaaaaaaaaattataaagcagcctcttgctaatggggaagcagcgggtctgagtcatgctaagtaagccagagcatttcatctggaaatccctggtctggtgttacccattgcctttgggacattcaatatcactactgcacttgagaaatgtggcttctggggctcagagaggttaagtgagtgggtcagagtcacacagccagtgagaaacagggccaggacgggaagccaggctcccggccctctaagagaaactcttttaagtacctcaaggtgcccacgtccttgacagctgacccagactggtgtgaggacaggaagggaaaagacattctgactattgcctgagttggacagagttaagaggataaatctgggaggatatgatatcacaagggttcagatagaaagtttctaaattattgcttaacttgtttcatcaaatgaattgcttccctccattagcccagggctgaagtggccaattacctgccttctgcacaggacgacggccgtgtataaatcaacttgggtaggtaacaaaggaatagccaaaattctaaaacaaaaatagatgagagacttaagcacaccccaaaataaaacacacacacactcggtaactcaagtattaagttctgagacggccaggcctgagtccctctcggcctccatccagagaccaaacatacagtctctgatgatgctgagcgtggcaatgaggcctttgcataggccacgatccctgcagcaaactgcgttgccttccctgggctttgggaaggacacttaaggctggagattcaactaagtgcaaagctggtacctgcagacccaggggcaccagtcagtctacagctatggagggtgttttaatgcaaatggtaaggcaactttgctggtccctccttctggctccaggatggcacctcctggggctgctgggcttttcccaggtcttaaaaggaattctggtattacagaaatactcagagttttggagttagaacagcctgagtttgattctggatgctgccactcactagctgtatctgccttgggtgagccatttaaacatactgaaccacagctttctcatctgcaaaatggggataataacaatgccagtgtcagagggctatcaagaggattgaataaggttaacatatacaaagcaccctatcggcacctggcaaacagcaggcatttaatgagtgtgggctccctccaacatagactagaaaaactggtcgaggggtagcctctccctaggaatattctcttcctttatacattacattaagagggtgaaccagtccaagccagattcccaattccatccttcagcccaaggctgctccattgcacagcttcaggaggcactgcccatatggtggtctagatgtgtgacgcttcccggggctgggcagtccacaacctgcctcagcctatggagacacccatgggatgctaagagggaaagaagagatccaaatccacccttggcagaaaatgggaccatcccaagaaagtgttcctggcaggagctcagtgggcaggaagtaggatgcccagcaagggcatacccttggcgggagcatcaggaactaaggcaaaaatagaccatgaggcccagggctgcatccacctcttcctggcccagacctctctgcccctctgaagcctggctgccctcactcctcgatcctcagtgcctagcatggactctccacacccactctccctcacttcgcctggtctccctaactagagagcaagctccctgtgggcaggggagtaactgatatcactgtggtcctcttgagccaaacacactgtgctaagaaagcccaggcctgcatcatctgctggctagctgcttcttcatctccaaagcccaattgacacagccacccatgtatctcagaggatggttagagagcccaaacgatgctcactcagtctttcaacaaacatgcattgagaacctactgcatgagctctggagtgcaatagtgaaataggcagaaaggattcctgtcctcaaagagcttattctctagtgagagacaaaggccaatcaagtacacaaacaaatactacatattacatatatgttaaattgtaatcaactacaagaaatgagttcactgcattatataatcaaccattgaaggcttcaatagtcacagaaagactgatgcaagagacaggctgaatgtagctctagtgagagagtaaggagccagaaaggtaaggaggggagaatatgagcaaacaagcctcctgtgcaggacatttccgtctgctgtgaccacccttcacagaactgagggcttgcctgttctgtcacgtgggatgctgatgtccatgagggaggcaggttatcacctttgatttgaaagccctagaggcagtgaagttgcaatcagatagacaggacctgaaagaaagaaaaaagggagggaggggggaaaggggaggagaggaaaaggaagaggagaaggaaaaaaagaaaaagtagagaaaagaaaaaagaaagccagacccctgtgctaggaaaaatctagctagaggaacgcagagcctagcctgtgatcttaaggtgacttctaggccagactgtgaagggcaccatgtcataaagccattgccacctccatttgatgtgcaccatcacctctcctggctcttggccttatagattcaccagtttttaaaaaaactcttacattgcagctgcttctcagaggctgagactcagtgactgtgtcagttttcatcttaattcatgtctgtactgccacactgttggcaggacatgtttcacaccaaataactacactttaatcaagctctctgttggttgcattttttgatgatggaaagtccgtctccgaagcagttgtcttcactaatgttgactgagcagtgctcagcagatgtaatgctgagcgaataggggatcccaagggactccagggtgccagtgcgatgatccaacagggttccagacatggcaatttagttggacttcatcctcagtcatagaatccagtggcagaactctatgtcacagcatcacagttgtgtggacacacagagctgccagagactataaaggccatagccttttccaccagcgcctgcatttgcccctagggaaagccaactcgaggtcaaggttagttcccaagtttccagacttgagagaggacagtggtcagagagtccagaagtttctgaaaggctgctccaaaagggcagggaggcacagcagggccacttggccactcgccgagttctacattcacagggaccacgaattttgaccttgaagctattcctgattaggttatgtacacattcctggagatgtattcatggaaggaaaaaatatggcattgatcatctgatttaaacttttatcctgttaccagatctcattctggtagtacactaggaattaatatgaagtttgcaaattaagtattatcctttgaatagtacaatcatattgtttccttgtttttatttttatttttatttatttttaaattttttgacacagagtctcactctgtcgcccaggctggagtgcagtggtgcgatcttggcttattgcagactccgcctcccgggttccagtgattcttgtgcctcagcctcccaagtagctgggactacagatgtgcacaaccatgcctggctaatttttgtatttttggtagagacagggtttcaccatgtgggccgggctggtctcgaactgtcagaactgtcaggggattctgtcagaaccaggggattctggagtcagaatgcctgccatcttctcctatagctctgtgtctacacacaagttacttagcccctctgtgcctattaagggctgatttatgttccccaccaaaaattcacattgaagtcctaatgcccagtacctcagaatgggatgtattcagagacagggtattcaaagatgtgataaaattaaaatgaggtcattagggtgggtcctaatgcaatatgactggtgtccttagaagaagaggaaattaggacacagacatatacaggagggagatgatacatacacagggagaagaaggcagtcttccacaaggcaatgagagagtcctggaaccgatccttccttcacaacccagagaaggaaccagccctgccaacaccttgatctcagacttctggcctctagaactgtaagaaaattaatttctgttgtgtaagccacctggcctgtagtactttgtcacagcaggcctagcaaactaatacagtgcctccctttcctcatcaagaaaatagaaatgataatagtcccttcctcacagagatgtgttgagtacccagttcccagcactcagtaggtgtccagcaaatgtttcttgcactacttgtgattagtacagagtcttaacccaacctggtctctgcatgcttcatcttactcttctgtgtgagaaaagaggcttataatgaaagcagagaacagtaaattctgcagacaagtcacacacttcacaatccccaccaccctccccgaccacttcgccccaagcaccttaaggttgaatggtttgagtcccaaatctgcacttgcataaggtttcttttgctctagccatgtactttgctgactgttgtaggacccgcctgcccatcctgtgttctctccacccaataccttcaaaggccacaataggaaccccgctactccttggtttatcaatattagacaacttaggatgcagttagagatccacacgccatccaagtccccacattacagaaattagaagcctctccttccagtttattggagaaggaggatttctggtcaagacgtccaccttcaagatgaggtgaagagcagacaccactctggacagtttgcctggccacctaaggaaaacacagcgtttagagggcagcgccagaactgtgtctcctcaagaaatttgtcttgagaagggtccctgaatataacggttgccagaggggactccttggggcctagagcaagcttactgggggtcctggaagagttctcagaggtgtgtgaactcactggcagctgactgagaaactgggagtggcacaaagacctttagaaaccaataaggacttcagaggtatcacccacaagcccagaagtgtggccaaactgaataccccagctctctgctgcctcagcaaggagccagggattcagtgatggtgtcttcttccaaacctgtatggcatggtaattaaaatcaaggtcatttagaacccagaaaccaaagccattctgactctagagggaattttaatttgttaatggatcttccggctgatggctgggggaaaagatagcaattcacaatgggtttgaggccaaaaatggcaccacagtggccgggaagccgctgatagctcctcggtcagtcttcaactgcagcaaggaacaggctgggctacccagggatacagatttttttttttaactttttaatcagctaatagcagatgaagacctaacaatgctgccaagattctgctccttctgtcagcagtggtgagaaggaggccagggtcggatgcgtccggctgcctttgctctctgaggttcttttggagggatgtaggaatttggggctgaggaggaaaccccagggccatcttctccactggtcaccaactgcaaggatccaggaaagggaaacaggtggaattctcagttccctatgccaatcctgggggagggcctgagacatgtactgtattaatttaccccacaaatgattatgggctgcttaaacggtgccacagatgtaatggagactcagcaaactgaggaggtgaggcccggaaacgtgtcactaaagctgcttactgtgtgccgcaaagggaagactccgggtggcctcagacagagggagggtagggcagcagaagagcttcatccagaaatgtaaaccaaaggcccggcaccctaccttgaacacccagtgctgccggaagatcctgtccccacatgagggctctgggcaggggatctcctcctaaccagcgccagcgaccacaaagggtgctcttcagtggagaagaaaaagaagaatctaattcctgacttttatttttagctgcaagtcagacagaagagcagaaagaaggcacttgaccataatcctgatcatactgaacgagtaatttaatcatttttaaagcctgtgtgcaggctccgccatcttactggggtctaacttgggaaactctcacctcatttcaagcaaccagggtttctctacaagagccatcaaaaactacttctttagaagcacaatttctaggcatttgttttgtccaaaaacttggattctcttactttgttccttgagctaaatcaagcacaactatgccagctgaggcagtgaggagaaaaccggggtggggaatgaagcaggcaagagggcctcctgccctcagagaggcagcccggctcatccaatggatagacgcacaccatacacacaccacacaacacacatgtaacacaacacacactacacactgcacaccacatacataacacaactcatactacacacacaacacatatacaacacacaatacacaccagacatgttacataactcacactacacaccacacacataacaactcacactacacacacaccacacacaacacacaatacacaccacacatgcaacacacactacacaacacacattacacacataacacaactcacactacacacacaacgcacatacaacacacaatacacaccacacatgtaacacaacacacactacacagtgcacaccacacacaactcacactacacacacaacacaacacatgtaacacaacacacactacttaccacacacaccacataacacacatcacacatacacacaccaagcaccacacacaatgcaactcacactacacacacaccatgcaccacacacgtaacacaatacatgctacacacacacttcacaccatacaccacacaccatacacatacacacagcacacactacacacacaccatacactgcacacactccataccaaataccacaggtcacacacacacaccacacacactatacatatacatacataatacacacccaacacatatagacacatcacacactacacacacacaccacacacactatacacacatacacattatatacacatatcacacatacacacataacacacatacacgcattgtccacacaccatccacgtacataccacacatatacacacacccaacaaatatacacgcagcacacacatactatacacacattatacacaacgcatgtacacactatacacacatcacacatatatacacacacataaacatacaagtggtatacacacactatacacacaccatatatatatacacaccacatacaccatacatacaccacacactacacatcacacacacataatgccacatacacacaccacacacacatacaccacacaccacacacatgacacatattcacatacatgtaccacatacacacatgcaccatacacataccacacacacacaccacataaatacccacacaccacgcattctgcacacactacataccacacatatcacacatatattatatattcactgcccacatacacaccacacaaatacaccacacacacacacactacacacacactatacatacatcacatagacacagacacatacacatagcacacctaggcacactatgcacatgtcacacacacatcacacacacacagagagcgtacatactaaacacacatcacatatacacatacacacaccacacacacatactacacacacactatacaaacatcacagacacagacacatacacatagcacacctaggcacactatgcacgtcacacacacatcacacacacacagagagcatacatactaaacacacatcacacatacacatacacacaccacacacacatactgtttatttccttgctttaataaaaaaataaaaagagagagaactttaaaaggaagcagaggaaaataggcatttggaaaattagccccatcctaccatgatagctcctataaaacatcttctagagtctgattttcccacatctaaaaattatttctttttattctgttgttgtttggcactacaatataaatatctgtgcgtgcagaagcagcttttagtctttcatctgtgacatctgtggagagcgctggagcttgtgtttattcataggcatcagtccgttccacccttcaaacaacaaaggaggcaggtggaacccagagatcagaggagtgaagacattagctcaagggctcaggatgggctccaggtgcacttactctatgctgtctgacattcatggtgggctcgtactaggattgggcagggtgagtttggcaaaccaaaacccaaatgtgcacttcccagcggggccacccaccagggtgctgtaccctaaccctccacggctgtggcctgccctgggtcacctcatggcctggtgctgcccttcacacgaggaaaacccttctgtcagttcctagtctccatctttctcctccctgattccaaagtgcaggtgcctgctgactgagttctttttagatgaagtctgttttcaccataggccctcaaccaaaggccagttgacttcaactggccaactttcatctcaacccagaattacagctatccccaggaggcaggcattggaggagttgctggaccgcagaactgaacactcacatcctctgagaaacggagcagtgaaggctcttgcaattatctcctgaggggggctgatgaactgggggccccagcctggagcagtggaggccaagaagagctttagccctgtcttcaagggcctgaagagagtggcccagtggtcagatgtattctgtccatccccagggggagaccagaaccaccagacagaagatttagagagaaatctctctcttgcttttcagtagagcctgactttcacaagataggaggggcctccgtggatggaaacaggctccctggcacaggaggcatttaagaagaggtggatggtctctcagtgggacactggagcagggggacagacatcgggggaagggtgggccagtgcgacctttccaattgcctcccaccttgagaatccctgactcgacagagtgaatacacagccatctgagacctcctggtcacctgcctgcagggctctcttctgggcctaaaaataagattcccagagtcctgatccaaattagatccttaataacgtgtcaccatggctataaataagtctctttgagggccagttaatataattattttaatcagctacactccctagaaggactgccagctagctccccgctcagcctcgctgcgttctgaacaggtgcgctcctcctccgcctcacccagggccggtccttagagcagtcacaatgatgaagggtgggtgggcagtctctctgcttccctctctctaatgtccctgagacactccttccattctggggcctacattctcccttgatcattcaccaagacttccaacaggaagacaggggtgaaaacgcaaagtctacaagagccagacacacagcaaagacatgtaaatcacacacggcatgatgtgagagagagtgttacggactgaattggttccctgcaaatccacatgttcatatcctaatccccaggacctcagaatgtggctgtacttggtgacagggtctttgaacaggtgattatggttaaatgaggtcattagggtgggccttcatccaacaggactgatgtctttataagaacaggagattaggacatggacagaaaaaagaccatgtgaagatacagggaaaacaaggcggccatctacaagagccaaggagagaggcctcggaggaaaccaatcctgctggcaccttgacctcagacttacagcctctagcagggtgagaaggtaactgtcggttgtgtgagccacccaggcgatggtcctttgttacagcacctcaggaaactcacatggggcgcggtagggtgtgccctgtctggaggttccacattcttttttttttctctctctcccaaagactggacagccaaacaacacagagccctggacttctctgtcattgtatatgactccctgagagaatgtaaggaaagaaaagcaatagggtgtcagagaaaggacattggcctggccgggagagctggtgggtttagccaggctacctgagcaagctgctcagtcttgggaactattcaattatgttggcccccatcctatcatcagttaactgaaacacctggcccacaatgacctttaaagagccttccaggactaacaattttgcccctgggtagcaaggggcagcctcagatcatgagcctagaagggagaagccctggaggacagagtgggacaactgcagaaggagcacacagaggtgtgggtgatgtcaggaggctgcttgactctttcctggagctaggagctttcgttcctgtcccagctgctctatttgctaagtgcctcaacttgtccccctcccgggcatctgtaaatgagataataggagtgcacgtgttgtgtaccagtgaaagtctacactatgccaagcatgctcaccattacgaaagaggacaaggacaggtgggtgcccagtggcttctcaagactgacatctacatttatcagattccccaaggggcaactccctgggcaaggcaaggtgggtcttcagagttggggccggagtgcctgtcttctccccaccacaaacctaggtgccacattactatacagtcctaaagatgctttaggattgtggtttcgtgctgaaggaggcaggggagaaatcgtaacttgcatctcccaaaggctagaagtgaaattaagatccttacacacgcttagtggtctgcattttacatagagctttcaccaatacaatctcccaggtattattattcccattttacagatgaagaaaccaaggcaaggggagattaatgatgaaaataaggcagtgtaaaaaaaagcacaaggcttgggttcttactttgacctttaacaaagtcacttaatatcttgttatcacatggcctgcaaacaaagtcctgtagccagtacaagcagggtcaaaacatgacctgaggacttccacccagaacacgccatatgcacatttcacagattcaaataatctcagaactggaagggcccttggcaatcacagatctgattcctttggatttatgccaaggaaactgaggtctaaagatctccttgctcagggtctcacagtgaggctctggctggactaaaaccagagtccagggttctttttcatagaccatcctgccctgtcaatttgacttcaaaatcttcctcttcaacacaaaccacaaccacaaagagaagggtcttctgggttatctgtattgggttgcagaaagaagttccacccgtacccccaaacctggatacttcctccaggccgcacggtgctggcctcctccagcgactttgagcaggagagcaaatgagtcaagctcctctcacaggatgaggctgctgggagcagctcagaggactggaattagaaattctaattattagaactctcggaatgcaccaaaggacaatttataattagcacatgtcaaaaggccatccgcaaaggggacacattataaatcagaaaacaaagatggccccagaaagggactggggagctgagctgtttggcctcccacccctcctgatggccctaaatccaatccacctcccactcctgtgagccctcctccctcctatgccagcctctctcctgctgctctgccctttgcaagcccagcattggtgcttcccgctccctaagccctcttccctctgctgctcggtcagggccactgtccgaaggccttagcacagggatccctctcttcagggtccatgcagctctaaccccaggtcctgagcgggtcagaggcttttggctcctgctgtcacaggctgcaaataaggatttaatgactagcctttttatgaggaagaaaatgtctccagtggactgataatgtcatcgtctgctgctcaggtgcatgtgcccaggtaagcctcacagccagaaccctgctcttatgatgaaagctcagggcacaatcccagtgcagacttggaaaggccagcatgcaaaagaggtcggggcacctccttgtttcttccatgaatgaatgaatgaatggattttctactgacttatatgccataaatattttcttgagtacttcctatgtgttagtcacagcacttgagattggagaggaaaagcagtcaaaaacacagaaataaataagacacgaccctaccctcccagaattcatagtagcacatacttgacaggtgaaaacatttttagaaaaacaaaaacgaaaaccagcaagagaactggcatctgaaggcaggacacctggattccaggaaaagctcttagctgcatgacttgcctcctgccggtcatttgtcttccttgggcctccatcatctgtgccatggagataataccaacttcgtggatcccacaggggttgccatggaaaacatgataaaacacaggaacagaccctctgagaaatgtctgcagtgtaactccttatcataacacgaaacactgaagattctgttggctgataggaataagaattctattttcccacacttgccagtctgactcaagatggcacctagttccttggacaaagatcccaagggtagagaaaggcaatttatcaggccaccatatgtctgtgcttaccaaggaaccttctagatggtgacattttctcatatgctgtggctcacaggggaaagactgcctctatgtctagggatgacaaggttttattccaggagcaaatgaaccccatctgtgtggtagtggctgcctggagcactgtgttaaaaaagatcctgaagttgcatcttggcttggctagaaagaacatcctgatagattatggatgtctgttatgaatatggagttggggagtggcactttgttacttgtgacctaggaagataacatgcccactcaaccacactccttgttgcacacctttctttagagctgtgtcctctggccattcaaaggtgagctgagtattggtcaatgccctgaacacgattccttctgtgtgaattgttaatattaagttcttagagccagcaaagcctaagacatatgcccagcaagaaactgctatttttaggaaattagctggtccttcagacccggttaaatgtgctaggtggtctcagtcatgttctttataaactgagaagaatgcctcacaaatttgggtgtcattagggtctgtggatcccgggcactgccacacaaaatcacccggttcaaataccctgcaggtacatgataccctctgccgttaattctatgccattttgttgaagtctattccacttccttcctttaccacttctcaggacaatgcattctctgagtttattatgagctttatgctctatgaattcttgccatttttctaatatttaccctgcttgcgttttaaaggggacctctctcttagcatgtcaggatgtggcaaagagtctgtactggcttagttgctctgctcacacttttataaaagtctattatgtctgtgttaattcccaacagagctgagctgcagtcaacccctgaactacttattaaaaagaagcactgagcagatgaacgctctgctcatgactgagaggggaagagaacagactgtgtccaagtccatcaacacatcatctgtgcaccaggaatgctccaaacacaaacagccctagtgagtcacaaggatagatgaatgctacggtgattcttacatttgcagtcaggaccacagagtgctggagacaagaggcagcttagaaaccatctagtgactaaagatgcagaaattcaggcccagaacaattaaccggcccacagtgttactccaagccaggtatacttactataaaaaagagtatcacaaaactctacatgtgaggtatttcatttatgtctctttttgctatttcagatggtttcctctcagaactaaaagcacattgtattgcacattgtagatactcaaagtctgttaaataaataaaccaatgaggtaatgtacataaccctgcagaaggatttcagtacaatgctatttataatagcaaaaaagaggaaaaagtaaagagcaaatataaggaaaaggagtgagcatccatataagatatagtcatttaaaatatgtttatagagtcccagtgtcacttggaaatgctgataacgtaatgttaagaagaaaagcagaacactaaatcgcacatattctaggatctcggcattataaagaaaaatgcacagtaatatatttgggggaaaataaaacgaatcatgaacagtagtagatgtttctgttgtgattatgggaggttttatttctgcttctttgcactctgctgttttttgcagataatttacaatgtgcccataggattttcataagcaatgcgagggtattaagaaatagaaaagaatatccacagatattattcagccttgctgggatttggaaagagacagagatcatttctctcttttcacataaagaagctgatgaaacaaagagacagagacactagtgatgaaggcaggcattagctctctggtgtggagggccatccaatgccaggcaaacaacagatgcgggataaaatccactcaaaccacagtgggagggggcaggaggtgtccagtcttcctcttcacaaaggttccatccttaccttatccaaaagatgagcaatacaaggctaggctcagcctttaccagcagagcctccccaaagactctctggcccctgcagccaatgacaataaattaactatcacagtgaggtttttccccttcgtcaggcaatgtgctatacacattgtctcattaaatcctccccatgtctctgaggcaggtcttactgtgcccatctgagggatatagagaccaggactcacacaggtaaacccaggtggccaaggtgtcacagtttgtaaccggaccccagaagcctaagccctcgcccctgtgccccggctggtcattcgttcctccagatctttgcagcactaagaagatgctgcctggtgacatttcctgaattgtttcccacgggtcttgtctttcaggctaggacaagttgtttaacctttcacgtgcgtctgtctctcttgcttccctcaattggactgttagctcctgagggggatgagggggtcctgctttataattccttgtgtgtcccacggagccaagcctggtgatgtcttcagtacttgacacttcagatctcagaaaatacctgctcatcgattattggattgaataggttaaggaggagaaccgtctcatgggcagacctggcctgcagccaagacagaagctggatgcgcctccctccggactcttgaccccaccaaatacgacgcccatatatgtcaactgtggcattggtgtttgtcccccacacccctaaaccacaagccaataaattgcagggcactcagacatcaggatgtgtccttcacttgccaccagacctgagctggctacaggccaatgacagcatagggctggccctgcccgcctcccatctggcagcaaggatccagttccagattgtgacctgtggttgagtctggcacagtgacccagggctccagcaggcaaatcccagtcataaaaccctggtctgaaccagccacgtgatggaccccagttatctcttcctaaattgcagcagagctgatcttcttccagctgagccaagggccatcagacagggacacgtttacttttactatcctattaaagcatcccagaaaaaaagaaacagtccccatatcctagagcaagaaataagcaaatcattatctacaatgatatcctttaagtctaagcttgcccagaaggtgctgcacatttggagaccaggctatggctcccctctctgaattcttttgaaaccgcagggactgttacaggcgcctccaagactctggagccacagcttgcctagcgcagcttccccctcccggcaaagccctccctgacaaccctacccacagtaatctcaactttcatgaaccttttctctccccatagggtgaacacataaagacacacacgtgcagccgggcacggtggctcacacctgtaatcccagcactttgggaggcggaggtgggcagatcacctgaggtcaggagttcgagaccagcctggccaacatggtgaaatcctgtctctactaaaaatacaaaaaaaaaaaaaaaatagccggaggtagtggcgggcgcctgtaatcccagctacttgggaggctaaggcaggagaatctcgaacctggaagggggaggttccagtgagctgagatcatgccactgcactccagcctgggcaacagagtgagactccatctcaaaaaaaaaaaaaagatacacatgtgtatgcacatacacacgcgtgcacacacacacatacacacagcgtgtacatgttatttctccaatgaaagcatatttcccttaagggataggaccaatcacttatctttccagagtctaactgaaaaatggacccaacatccttgaattaataaataaatgaacaaataaatttgttgatggactggtcagttgataatgtcaaggaactccctgcaacagcctacacaggttcaccctcctccaaaatcatacctttccaagtccaaggaaatgctcaattcaatcatgctgttttagaaataaagtaatgaatgatattaacaattgtttagaaactaacaggtgcctggccaggcacgatggctcacgcctataatcccagcactttgggaggccgagacgggcggatcacaaggtcaggagatcgagaccatcctggtgaacacagtgaaagcccatctctactaaaaatatagaaaaattagctgggcatggtggcaggcccctgtagtcccagctacttgggaggctgagacaggagaatggcgtgaaccctggaggcagagcttgcagtgagccgagatcgcaccactgcactgtagcctgggcaacagagagagactctgtctcaaaaaaaaaaaaaaaaagaaagaaactaacaggtgccaggtactaggcttttgatataaatctcatacgttaatcttgtaagtgaggtagtattatcattattatccccattttacaggtaagaagaataaagaccagagggctatccacaactgaagtatagacagtgggtgaggaaacatgaaccaaatggttcttccagactcagggccagatccctggcacaaagtgcctaccctgcattgccttcagctaacgtgccaagcagacagttcccatccttcaattttatttaatcaaagcaaagaattcataagaatctgcccatgttcattattcaggcagattaaatatttgatagccctgtagtttaattttttatggctcagagattggagtgaagtgctccctgggaagccacactgtccctgggacagggcagcagctggccaaggaggccagaggccgaggctccacagggctctgctcagcacccacgtgcatctgtcctgactccagtaagctgctcatgctgggtcccagggccaaaggttacagacactttgtaagtttgcaagagaatctacaaaaaggaaagaagggctgtggggacaggaggcttagggcatcacaaaatcagaaaggaacccagatgaaccaaaacatccaggtcccaggaaggggaggcagcctcctccttctgtctctgaccacgcagcagaaacaaagcttttggacaaatgcatgagacggcataagggcaggatcaacttgtccatctctctgccaactaaagcaccacagggccatttgggaccttttgcctgccccttccagccacatgtaaccttcacagtcactacatattcctcccagttcactgtctccctgcagaagcttgaaagtccacagagaacaagaagagctgggagccaagagtccttcacagcctcaatctgttctcctctggcctaaagaagctctctttcctagtccttttcttatcttcaaaatgaaattccagcagtttttgtctcagctaccccaaaatgcccaaatgtcatgcagcatgatttcaatccctgaactgctccaacccaccccgatgcccccaagtctctctcttgctctccttccctcctttcctccttccctttctccctccttcccttcttctctcccccatccttcctctcttctctctctctctctcacatacacacacacacacacacacacacacacacacacacacacacacacacaccccttgttcttctgtgcctaccatagaacaagacctaatatctaagaatttcactggtacccagtcaacatccaaccaattaatttgttcaagggtttagaggggccaggagaggagactttttcactccagcagcccacggagatttctgttttaatttctttttaattggcagcgccactaacagcatatcagaaatctctctgctccgacccttctcctctcctctgttctcttcaacttttacaagggaaggacatccggcagttttctggaaaaatagagacatgtcacagcagagcccagctcctttttcctgccatccctattcatcaccagcctcctgaggagccggggtggtgacacaggctctcacttcatccatgtggggctcatcggggcaggtgacgaggagaaaggcatgcgccactccccccagagatggggcctgtcgcctcctgggaaaactggggtggagggctctcttccccgatcacctggctctatcttgctctacagacacctcactgggccctcagtactctcatgagaagagagcagacttccagccacccctgcttgccactccaggcctctctgctgatgggtgtatggccacgggacactggaaataacaggagtgtgtggtgagggagaactgtttgcccattttccacattcaagaacctggtgaaaagatgagcaaggattatctccacactggaaccattcatgctgcaaaaacagcactgagacattgaaggggaggaggcaatttatttgctgtcttgacactgtcgcccaagcaattctcatcgtgacaaaagaacactctggacaatcactgcccctcctctttcaggaaaccacactgagttttcatgacttgcaggtgacattttaataaggaatcaacatggaaccacaggggaagtaagctgaggccaggatctaggaggaccagggtgggaggggccaaaaatggcactcaggaaacaaagtcacctacggtgcaaaggctctttgtgcctgcaagtctggcaccgtgggatttctggcttttttctcctctctcatttactatttgggcagaggggaagtattttccagaaaggacaaagtagaagcagcctcagtaaagagctctctagaaacttctcctattcagttggtgttttacaaagtgcaaagcactgcaggcacctccattcacttatcccgttacgtgggtgtcgttatctacatcttataggcaaggaaaatgatgtgcccaaggtcacagagctactgaaagaaggaaggagaaatcagacatttctgtgccacctccttatagaagttgccgtcccccatcataatccaattaatggtaaaaatcacaactgaggctagatatgcagtaactccttgtgctctgcacagtgctaagcactttacatcagttgtctcctattttaatcctcatactaatgccaggagagaggtgttatcactctcatttgtcagatggggaaatcaaggctctgggccatcagtcacttgtcccaggccacagaagcagcaggagcagaaccaggattcaaactgtgtgcccctgcctgtgtatctccatggttctcaatcttgcctatcatcagcatcacctggacaaatggtccaaacaagacatgctgggccccacccaaagagtcgctaagtcagtggggctgaaagcaagcctaagaatctgcatcgccaacaacttcccaagtgaggctcttactgctgatatgaaaactccactttgagaacctctgctctgtctagcctgcctcttgtcacccacaagctaatgtgagcatcctgttagacaagtaatggaacaagatgtgcaaaatgtggctgcaggaagttcacttcctgatgcacaaaatcgctccaagaaatcacacaccatccagaaacacttaagcatcatctgcattaaacatcaactaagggatgttctaagccaatttactctaagactcactctctccttcttctgaacctcctctgctgaaagtgaccatcttccagccagcccacctcatgatcattaaaatacagctgtggagacatagggagcacttctgaatgagcaacccccatcagtgtccactcccacgtgtgtatttgtatgcccatcatgcaccatatggtgctcatattacatacgcaataaagtgcacacagatgtaatcattttaaagagtgataaacgtaaatagaaatagatgtcttaacattttcttcccctattccaaaggatagttttgtgcatcccactttggaggctgctggtctagaattcactgttcccgtttctaatttctgatcattagaatttggcaaccaccccctgcccctgcaggctgaccgagcgtgtctgaagagttgctgtgctctgtggttcgaggaaaagccgtttcctttctgttagcaagcccctagagaacacaggctgaccctccaagacttgcccagcacaagctctgtaagtaaggatggctcagccaaagcttcttgactgtgggggtcttttctccaaaagagaataagaagcatctcagagcccatagagaagacagtggctgtctctaaaagcttttgacctaacaagcaagagcaggagactgagccctcacttctaaagcagcaggaggagagggaactggatcagggtcagagagcaggccttgggatcagcctccaccaataaccatgggtgagactgggaccacactgtgtcccccaaggaccaatgtccttgcttgtcaaatgagatatagggtgaccaaccagtattgtggggcctcccagaatgccagagtttagtgccaaaactgaaacacactagaatgtttggtcaccctagctgtggaccaggtaccgggctctgggcaactataagtgtttatcagccctaccctgacctctgctgtaaggtatcctaggagagcctgagggagctggaggccattccctgctcactagggtgttgcaatcctaacaagatagagataatgataagccatgccaagtcaaatgtcaataccaggtcaaaacagaagctggaaagaggacataatgtaggctgccgtggccaggacagaccttcaggaggagggcagggtgcaggaggaggcagattaagcacacactgaagtattctttcctcaacctcacctcatctcctccctccccttccccaccaccaagtagagcaggaccgcagagaatgaacttaggctctggagtcttcctgtttgattccaaatctggtgctacacttttccttttggagtgatctcgggaccattactcaaactgcatagctgaggtattgttttctttaaaatggagccaattataccccactttccagggttgttctaaagattcaatgaagtaatgcacacagaacactttgaaattgtggctgagagcacaagctctataaatattggctgttcttaacctctcttgacccttttcaatctgttcgtgaatctaaggtattttcaaagaacagtgagctctccatgagaatgagctatcctgaatatttctgttattaatgatgggtacagccggcttagttctgcttctatctgtcactcctgaagccagggaggatgagagggtgtgtggagagaaagtcacagggaagccagccctggccccgggcaaagcccaagggtttctcctggccctgtgcataataagaagcagcttcctctgtctccatttccagctcctagccccaagcaggcaagtcatggaggggtttcccttcctccctagtcccccaggttctgaagaaagaaaggttcagaggccttctccctctgcagaaagggtatgtcacctcaggccatgacaagtccccagctaagcatccgctcaggaccacttaaagctcttgaaaatgagctgtcttagctcatggcaggtttcaagaatccctgcaggatgaaataccagcagtgttccccataaactcagtcagcgatgttgatggtaggaaccaggaaaggtaccgtcctgcctaactttctctccatccagctcagccctagaactcaacacatatagtagaatctagatgagtaaacccccacacagacttggccctgaaattccaccattaggcattcacttctttgatatgaacttcttttctgtaggtaatacatttttttttggttgcctggtatgtcaactggaacacacttaaatgaagaagaccaagattcacctcagcctctccccttagaaatctcgcaagtcaactggggaaaacaagccacacagaagtgtaatacacaaaaagaagtgtatacttcttcaaaaagtatatacttttggtgcaatacacagaaagagagagaagtgcaatacaaaagagagagagagacactatcacacttgccctcaaagggatacccccaacaacactgcacattccccttaccacacccccattgcaccttcaacacaatatcccaataaaagtaattagattaaatggtcattgtttgtcatgggcaattctctcactgtactgtgagttccttgaggcaatttttctctttttatccccaaaatttcgtgcatgggacagagtaagtagtcaatgaagatttttaaaaattgttaattaaggaatattttaataaaagtaaaatggaaatgcaagacattttgagaagggcaccagcttaagccagtggtcctcagagatggccctggacctgcaacatcacctggggatgtgtaagaaatgcaaagttgtccctaccccagaactacaaagtcaggagtccccaggttgggctggtactgtgcgttttaacaaggccatccaggtgatgctaatgcccactcaagtttgagaaccaatgacttcattcagcctttatcatcagacaccttctgcaatatgggttaactgtcctcaactctgtgaatataggcatatattcattcaatatatgcctattaataagcacccatgcagcaaaggccaggtggagccagccctggtcattaggtggcccaacgatgtcgacaagatggcagacaacatggtgagtccctaagcagttactcccaaagaccctcaaaggctgttctgagccaacaggaagaaaggccaccaagttgtggctgtggccagctgactgccctttaggaggagctgtgaggatgagatttcctagcaggaagctgctctggggaagggggatggcatcctgacacctgggagcaacagcctggaccatggattgggaggcggagggaatggggcagggcagtgggccacccaccttgtgccattggctgccggaccctgagcactgactggtttggagcctggtgtctgggctggtaaggaagcaaaggtgaaaggggtgtgggataaggcaaggtgagggagcagctgagccagcatccccttctgatctgttgataggctccacatctaggcctcttctaaacaaaaaggctgagctgccggctcagcagcagctctgtgggtgcacagccctgcccatcatttccccctgtattaggaacaaccgcccaactctggcccctggggcaggcccagagcccaggggtgacgaggagacagcacctcagccctggaaggtaccatgtccaagtgctcctcagccagggcagccatgttctctggaaaccagtagaagtgcagaggacactctgttccccaatcaggggcaaagttgccacaacttctccagacttggttttccagggccataggtcacctgctgacacttcatttaaaccattctcctgttataaaaagggacagtttggccaacctctcaacttacaggccctttagcccagtgtggctagccggctcttcccaggcacccacaggccaggagctaggaatgcctgctccactcaaggcccacctgccccttcccatcttccccctctaggcagagggggtcataagggttgcaggagcctcagacaggggtagatgaccccagggcctacctgtgatctcagggcgatgggtagagctcacagggctgacagacaaaagatagggtgccagttacatttgaaattcagaataaacaagaaataattttttagcataagtatgtctcaaatattgcatagggcatacttaaactaaaaactaaaaaccaaaaacctatcttgcttatctgaaattcaaatgtaactggacaaccttattttctttttatttatttattttttattatttatttattttttttgagatggagtctcactcttgtcgcccaggctggagtggagtggcacgatcttggctgactgcaacctctgcctcccaggttcaagcaattctcctgccttagtctccctggtagctggaattacaggcacccgctaccatacccggctaattttgtttgtatttttagtagagacagggtttcaccacattgaccaggttgacctcgaactcctgacctcaggtgatccgcctgcctcagcctcccaaagtgctgggattacaggcgtgagccaccgcgcctggcctggacaaccttattttcatttgctgaatctaccatccttactctatcagcaagcccagaataggaaaacctggtttttccaaagcagagcttaatatcacaagagaaagagccttgaaaatactatagagtaaggcctcattcacatgggtgaggttgataatttacttcacaggtgagatgacagtatcaaggttctgtctggcctctggcctctggtcaattgattcaaactttggatcccagctctggtgcagctgtgctgcctaacctcagcaagtcactcccccttcctggtggtcagttgtctcatcttcaggttaggacagagtttctcaaccccggcactgttgacattttggtccagattactctttattgaggagggttatcctgtgtattataagatgagcagtgtccctggccgctacgcaccggatgccagcagcacccaccccaatttgccaatgtctcatgggaggcaaaatcatgcctggttgagaaccacggggttaaatgaccctatatcctaatatctagggctcccaccacttttaacagtcgagaattattgggtttacacatgaatttgtggcaaagattcctcttaaatatccaactcccataatgaatctaacaggagatgtgaatgaccagggtttgattacatgtaaactttttaaaaatgtatcctctacctcactcccctcaacctcattccagcattcagaaattgacctagcctgattccagcaagtggctccagctctttgatggccttacagacagcaatgacttaataatactaaaaaataaaattatcatcaccctgattgaagggaatgatttactggaacttcttgggcaaacagtttttgctagtttaatattaatatgactactactaacgatagagtgtgtagagtgcctacaacacgctaagaccacactaggttatgtcatttaatcttcacaatagacctaggaggttggtgctgtgcttattcacatttagcagttgaaaagaaattaggcagtttgcctaaagtcacagactctgcctgtgctctttccaacacagaaacagtctatttacatacagctctcacaggagtagggaaattcattcctccctgggcctccattccaggtaaatactcacagtctttcatctccaggaccgaaatctctaggaccacacagaaccccagtccttatagggctgccacgtacagacaacacactggcttgtaaatgtatcttgaccttgcttttaccttgaaccactctttgtaactccagggcctactgtaggagccctaatcagccctactgtaggagccaggcccacatcaggcactccctcaataaatggttgctaaataactcagtgttcccccatttcaaagatggagacactgaggtccacctctttccgtgcaagtcattatctaaaagaaaaccaacgctggctctcaggttttgtttgtcctgaatccaaaatcccccacagtgctgattcactttgttttcttaacttgctcttaagatcccacatttccttttgtattattagtggatggagagttgattggatttgagtgacctggttgcctggtggcccaaaggactggcccaggagaccactgaagagttctagagcctggatctggaactggggcctggaaaatcgtgtgtccgtgccctcagttactaggtcaccttgagtggggctgccacattgttccatggcccagtttcccctcggacagcatgctgagtgagattccccccacggcgtgctattattacctggcacaccaaggaattaggccactgctacaatgaggccaccccgccctccaagattcttcaaaattctgctccttagagcaggacaacagggcaatgtagggcagtggctccaatttgctgaggactgcaggatgaaagagggcatcttggggtgactgggtgaacactgttctgggacacccagctatgacagaagggaccacagaacaaaagggtgcaaactgtgggcctcaccctggggggaaatgggtttagaagtcatacacacacacacacacacacacacacacacacacacacaccctacatataccaccagggagtctaattttagtagccatttgccccagcaaagcactttgcaagtagttattttgagaaatggtattagccattcggttatttttaatgccccttctgtgacaggcatttgtgacataaacagcagctgaaagaccataaacccatagcccttagatgtgttcagggcccaggcagcagccccttgggatgtcccaagcccaattcaaatggagggaatgggcgagcatcttgtacgccctgccggtcccgcctcactgcctactgctccgttcactggggatgggcagcaagatttgactgaatgggaagcccctctggtctgtgacagccagtgtgctaatgacaaccttcagtgcttgccgacagagtgcaggtgaaaatccacactgctaatgaaggtccctcgtgggctgtccccaacctgatgttctcagaccctgctcccaacacatggcttccacactctctgccttcccacatcctcccctctgctcaagctgacctctcatttggatcagcccactcctcatctctcataacccagcccctgctgatctgcatgctctgattccccataatgaaagagctggatcacctccttggccttctgcatctaatagcttgaattgttggccacctgtgtacttgtatttcttattgaagccactgcatttactctgtactgaggatgcaccaggcatcattctaagcccttaatgaagttcagggaactttcctgaggatcctagctggtatcatcatcatctagattttcgagatgatgaaatggaggtatagggaagttacccaaggcttctttgcaagtagtgctctaagcaagactacagatgcaagagcctcacggtctaggtctaaccctggttctgcaccttggaaccatggacaagttcgtcagtctgtgcctcagtctttccctgagttcctgtaaagattaaatgagttaatgcttatatgatccctttacagatgtctggcacatgacaggcactgtctaagagtcctcgcttgtatgggagtggagaggagaggccagagtattgtaaggtaagatgtattagtgcctacaatgtgttatgcaatgtactaaagcattctgcatgtattatcatatttaatgctcataataccttgtgaaattttacaaagaaattaagcttagagaagtgaaatcattctcctgtggtcaaagccagtgaatggggatttgaaccaggtagctgaacacaagtctaagtttattaacctgaatcctctgctggttgtcttgactctctggaaactgatcatgtcttcagatttcccacagttcctggcactaggttgagcactctaaacagattcaatgccaattgcaggcttctgacaaggcttcctaaatgcagagccctggctgcagatcaggagaccctggcccctccaagggcaccccggctaatcagcctcttcttctgacttctgactccaccccaggacaggcatggtgcttcgaaagcagaagtaaggcagcagaacacttggagaagcctcgctgagggccagggcctggtggttcggatggcagcaagctgcccccagggacccaaaacccaaaggtcaggaatgtagtactggccagccagggcaggcactgctgtgtggtagaagagaagtccagaactgtgaggcgtcaagcgtgagttggaggcaggatggcagtgagaatgcacgcccaactgagcgagtgcgtgtgagtgaattatgtgtgtggttcagttttaggcactgggcagatttgcaaagctcatcaccctcctagagttgcctgcaaaaggccacatgtttaacaccacgtcaatcaatcaacggaggtgcactgggtggggagtgtgtggccaacccagcacggggagccgtgcagctgcagggaagagagcatctctttccccagtggctcatggtcatagccgaggacacaagactggcccttgtgggaaaattgaggggacctgttaaatgctgacctctaatgtggttccagttgagtcaccatatttcttgtgaacctccaaagcactggaagacttctgggcctcgcgtggctgcaggtgaaacatacagccaatcactccaccctggagtcttggtttcctcccctgcagaatgagagtgacgctgataagacatctcaggcagaggcgaaggaggtgagccctgtgggaatttcggctgcccctgtgccaggctgaacaagacagggcctttgctttctgggggctgatgagtcatataaaggggatagaatcaaacactcaaaagacaataaccgcaacacagggctgggtgaataaatacacaactggctactcagaatgggataaccatgggagaggacttttaatgccaaagaaactcaccacgttgcctttgactttgaaaagtgatctgtgcttaatctggcatttcgccaattggaccatgagcaatggggtcccagtcctcattacccagtgcctcctttgcttcaggccagggctgaataggtacttaggacattcctaagaaggactgtgcaggaggaggctagcccagctgcctggctagcctcagcacacacattccctggaacagcagcctcgcttactgccagaccccacaggggtttctgcaggggctggacaaacgggcacatggggatgaaaagggtagagtccccagagtcagtcaatgtcagtgaattggcagccgctgctcacagagctgtctggattctttgcagcccagagagcacctttcaccacccagatggggaggccttgccaaccctgagcccctcagggaggtcatacgtgtgattctcagacaccagagggagcagttttccagagagtgaagaaatgggatccgggaagcttggtgaattcgtctgctggggctgccatcataaagtatcaaaaactgagttggattaaataatagaaatgcattgtctcacaggtctggaggccagaagtctgacatggagatgtcgttggggtcagttccttctgagggctgtgagggcacatgtgttccaggcctctctcctagttttcttgtccttccttggcttacagattcatcaccgcaatctctgccttcatctttataggcattctccctgtgtgcatgtctgtctctgtgtccaaagttcccctttttataaatatgacaccagttattttgggttagagcccacgctaatgatctcatcttaacttgatcatctgcaaagaccttatttccaaataaggtcacattcacaggtacggagggctaggacttcattatctgttggggagacacaattcaaccaataatatttgagttcctcaaaggaaaaacagctttttaaaaagccaaactgaaattcctaacattactaatatactggaacagagtcccaagaagtaggctcaatgtgtgaaggagcttcccggttccagcccccacgttaccccagcccaggcctttgtggcctcccgcctgcactgctctgtgatgggccccttgccggctgccctgacttggcctgtctcccttctgctacctccgcatcaggctgccacaccttgcatctcaccaccaggtccacctcggtcacgacaccttcctggtctaaaggccccagtggcagtcaaccacccagagggctgactgtggctcactccttttgacttcagcacccttggtaatctgcaccaacagaaacatcggccaatgagtgccgtgatttctctgcccgttttctcattcatgaaagggagaaaaaacgaactctccatgcatctactcccaacacattcccctgagaagcctgcggggaagctccctgggagcccattgccaaagcttccacctcatggagctggcgtgtacacagacaggcacagcctgccgtgctgggccaccatactggtgactggctgtgctctggtcccagcccaaggggtgggcaaaagaggaaagccagcctcatgatgagcagaggacagggaagagacccccacaccagggactgacccctccattccctcagaggaagcagaggctactgagccaccagtacccccgcggttcctccctgtagttgctcatggaaagccaccagcctcaggaagtcttcctgtgtggaagctcactggcaccaaggcaggctgagcccctctgccaaaggttctgggcagccatcggtctgataaagacacagagccctccttggaggcctggaagccccacccctagaaggtggtccttgaaagctctgtcactcatttcttctccagagcccctgaagcatcctccatgcagctgtgcccacctgaccatacagcctggccctcccttagcagcaccctggactccattcctaccacctccttgacaacagaatcctgtctgtcaccctcctcaccaggtgcgggtcttcaagataagagaccacctcatgcatgttacaaggaatgctctagaaggagcaccattcaagaaagagaggacagggccgggcacggtggctcacgcctgtaatcccagcactttgggaggccgagatgggcatatcacaaggtcaggagatcgagaccatactggctaacatggtgaaaccccgtctctactaaaaatacaaaaaaattagccaggtgtggtggcgggcgcctgtagtcccatctacttgggagactgaggcaggagaatggcgtgaacccgggaggcaaagcttgcagtgagccaagattgcgccactgcactgcagcctgggtgacagagcgagacactgtctcaaaaaaaaaaaaaaaaaaaaaaaaaaagaggacaggttgagcgccctgtcagaccagtgggcccccaaagctatataccatgtttgtttacctacttgatttctcaacatcactgtgagggagctatgaacatcctcattttacatacaggtaaggtaactgaagttcagctagattaagtgtgttgaccaggacacagcactagcaagagcctgaggacacctggctcctgctgtcacctggctgtcttcacctggtgtcccacaagtacttcaaactctgctctccaaagctctgctcattgtcttcccactcgccatccttaccagcccctacccacactaccttgctcttcctgaatcctttgtcctcactaggacaccaccctctactctgctgaccaggcaaacaaaaggacccaggcgaacaaaaggaccagtgttgcccaaggcctctgcagaggtctgtgcatgcatctcagagagcgaactaaccatgggagttcagcactgatcctattgtgtccttccactggctttttgtctgagctcccactggaaaaaccctgcattcttacttgatgaattttcaaaagcagccagggctttattatcaactgtcttttatgaataatcaaagtccaatggggactccctaattagcctgggcatgaaggccatttgcataacatattgaatgcctctggagtgtcaggtacctcagtagacatgatggttcatgcactaaacctcagcatgtgaccaagcctatggccagacacagatgaacttgaaagtgatgcactggaagtcgatgccccttgagggtgggtgagctcacagagtctattcctgacactgttgctctcacctcgtgacaaagaaccaatgctgctttcttgcatccacccctgagttccagaacccccgcagacaggcttccaaaaactgtgtccccaaactaagactgtgtgatatgtaagaagaactggcaggggacccaacctatattataaaacctcttgatctcctaaaagagagctgagtttaacccgacttagatcaccaggacagatgctatcacagaatcttagaatctgaggttgtaatggtcttctccaattcaatatcaaatccagtgctcccagtcctcttctcctaggactttgtatttgaggtggggaataagggagaaagtggaagatgtggctaacttgcaggtgagtaaaggagaagtcaggaagaagtagtgacttgtcccccaattcccacactcaggagcatgggcagtggagggagaaggatgctgccactggcttcatttacatttgtccatttacaaataccatggcaacaagagctcaggcatgcaatgccctcctgcccagattcctgcttcaaaatcaaaacaaatccagtatgcctggaaaacctgccacagctcagcaaactaggaacaggtgccatcaatgtgccaaaaacctaaaggaatctgaaaaaaaaaaatcagttatgcagaaaaagagaaggcagggaggccccttgggcagctttgctccctgagaagcggcaggatggttgtgaaacaaggagtgaggcccttgaagaacctcacatcagagctgcctacatcagtagggctgaacagggaggtgagccaagtatcaggcaccgggactccctggtcactatggatcacagcagtgttcagcagcagcagcagctctgagaagccctgggaatcacatggcagatacatccagaagaaaactggccagggcaggggcttgtccctgacacagcaggtggcagctccaggaaggaggacaagtccaagcacagtttgtacctggcatgttggccaggttaaacagcaagccagatgcaaacagttggcacaaggtgcagtggctttaccaaacacagagaagaaatatcacaggattaagttccccttctggaactattcatggttccagctcactcacccagactcacaggtctctgcaaggcttcacttcatcatccagtgctctagtgcaagatccgagagtagcattctatgggcaatgaggtgcacagcagaggagcccaagagaattgaccctccctatttacaggcaaacactgactgcattcatggatgcaaaacacgaaaacctcccaccagaccttgaaaacattcttaactataaaaggtagagaatgcagcactcaaaataaataaatttgaaaaaaaaaaggactgggtgggaaagtgccattatcatcatggccaagagcacaggctctgctgtgaaactggctggacctgagtcctggcccccagtcagtacccagatgaggctgagtagggctcaaccctctggacatgcgtttccccaatctatataatgaggacaaacaaagcacatgccccttggagttgttctgaggtaatgcacacaaagtgcttagcacagtgcacagaggacagtctgtgctcagtaaacaactcgtgtgatattgtgataattgaacttggagaaaccatctattctatgtctgcagtaaaagtcaagagaacttatttctgaaacaagatgtgttatgaagggcacatttagaaagcactctcaaaatgaagaggaaaaaaatacagaagcagaaatactgtgaggtctaagacagattatacaaaaagatgacagatatagaggacaggcagccaattcagaataaacctaactgaaaagacgaaaacaaaaaaaagtttcttaacacagaagacagacccaagtctgaaagtcaaaatgctcagtaggcatgtatatatatatatatatatacacacacacacatacacacacacacacacacacatatatatatacacatacatacatatattttaatttcatggtgaagaattatcagcatccaaacagaagatatcagattatctatgaaaaaaaaagagaaaaatcaagctgatatctgatgtctcctctgcaaaacccaacagcagggccaagttgtcattcatattaaaagaaacaaagtgcaaagtgcgataaagcagaatacgttgttcaagaagattaaacaggtgttaaatttttcatatttgtaattaagacattaatcaaaacaaggaattcaacaacaggagatgtccatggtaataaagatctggcaatgaaccctaagatctattaggtttaaataattgttacaactgtgattacaaatcaaaatgaaaatgaaaactaaaatttattggaagagaagataaaatgtgaaaaatataataataataagtagaagttttaaatatcagattataccataaaagcatgagtgtaatattatggaatgggggaatgaaaagaagaaaaattatttatcttacgtggcaaggagtaagaggctatttcactctatacattaaccattggcaaaatatggttgaacaatagttttaaatacttgagaggcagcatgggtagacattccaatttaataaagaaaagtataaaataaaaaatttaaatatctattacagatagacaaaaaagactgcaaaaagcattttttaaaaaacagaaaggccaaaacatattagttattacaatcaaaatgtgtggtacacattatatatagtattaactatatgcaataatatataataaataaatatataaaattatacactgtttataagaaatataccctaaaccaagtgacaaaataaggttaaaagtaaaagaataaaccagaatatgccaggcaaaaatcaagtgaggctcacacctgtaatcccactgctttgggaggccgaggtggcaggatcacttgaggccaggagtttgaaaccagccagggcaatatagtgagacaccatctctaccaaactgtaaaaagcaagctaaggagtgatgccaagttaaaggcaatggtatccaagcaagtgaaattcaaggcaaaagacattaaataaggcaacacaggaggtttcacattgatggagataatccaaagtgagtatctaaaagtcaatgacttttaggcacaaaggaagcctcacaacacaaaacatcaaattgtcaaaaataagaggagacaagtgacagaaacccagtagcagtagaggagtttactgaagtactattgctctctcatatattaagttgtccaaaactaaacataattatgggtgattagaaggctggaatttctgcgttaactggtcaactggagagaactggtagaaagctcaaccctctggttttggaggttggaaactgagacgggatgatgagtcagtacagcacagactagtgtggtccctgggctttacctcaaatggaaacttattaaaaacacacattctcagacctatcgcagacctgaccgaaatcagaaactctggagtggggccaagccctccaggttgttctaatgcaggctcaaggctaagacccaccaaggcaacaattaagcccataggctctggagggccagggccaaatcctgccccatttcagcattgttgggtgacatcaaacaagttgcttaacctctctatgcctccattatcatcatccataaactgagaagaagaagaatagtgcctcctcttggcatggccctgaggacaagatgagatcatgtggacacaggctcacagtgcctgcacggtgtgagcactcattgatggcttgctttggttcaggaatgcttggcagagctgtgcctccagccccactgctctcctgcctcccaacacccagaggtgttgagggtgaactcctctgcacccaatcctctgtgcatgtgcctgaggaggatggactgtcccctgacaatggatggatgccacctcatggctgatcactgctgcatgaggcagtgtcataaacccctccttgatgctctctggctggagcggccagttgagtgactcatggagcttgtcatctcagggcctccttccctgatgcacacggccctctatccctgccccccagcctgattcctcctccccctggcaagactgcagagctgagcagaggctgacccgatctgggcccctcgtctctgcagaagagagaaagccagcatgcagcggactcctgggcaagttccaggatgctgtcctcaagtaccacgtggccactgctacccatggtggggtgggagcaggggcaggcagaggccttgggccacagaacaaattctctctgtctgtgagcagaccagggtcaggtgtgtcctagttaaatcaaaatgtcctgtggggcaggaaacagtttttccactcataaagatgcagttcaaatttgagatgtgtcagggatttcactgtggctgactgtgtgtcatcatgattagatcatacactcgagcattttagagctgtaagtccctatggaaatcaccctgtgtatccccctcctctgccaggtgagacccatgaaggacagagaggccctaaggcagccccaaggtcacacaacataaaaatctaacagcaagaatggaaaagaaactgccttctaccacattgggttgccatgaaacctaacagctgggggcgcctgggaagagagaaaaagtcacgaagtttcttcctgacactcccactgacaatcgtgattctgacaccagaaatgccttttcttcatagcatttcccttacatggagaaatacacctcttgtcttgcttcattcacagttaaatatgcttaggaagacgaggagacggaggcccgtactcttgagccacccacctctgaatccacctgcctctggatccaccaaaatacctgcccttcctatttgcccgaatgctctcatgtttcagagccctctcctccaggaagccctccctgcaaacttcatcttaccatccccttttccatcctggatactctagagaaatcagagctcagattgaagctgagtcctcagactttcagttgcgtctgatttggaaggagaaagaagaacccccacatctctggcacccccatggacaccaagagaagaacttcagtccatctgacagcaaagcctgaactctttcttcactgagttcaaatttgcctctaccactcacccaccctttgtcatcaggcaagccacttacaactctccgagcctcaattttcccacctggaaaagggcaataataataataccttcctcctaggttggtgtgaggattaaataagattacatgtgcaaaagctccaagcacccacaatagataccgaactggaagtcactataataaaactgataatgacaacgatagtgatggtgataaatatcattagtgtataatccatacttggaccaatttgggttttttgttcaagaccgctcggtgagctgagtgtggcggcacatgcctgtaatcctagctgcttgagaggctgaagctggaggaccgcttgagcccaggagtttgagacaagcctaggcaacatagctagatcctctcttctaaaagaaaaacaaaacaaaaccaagaccacttggcaactctatcaaagaaaggtaaacaggtaagagctttttgggttaaaatgttgcagggatctgaactcccacccctctaggccagggaaggagaatgggagtggtaagagacttcctagtttaaaaatataacaataaaatccatcttccaaataaaaactgacctagtacacattttggattttttttctttcttccaaagctctgagagttagttgaatcctttaaaaagacagcatgctcacctctttctccctagcaccaatgatttggagagacagatcacttcacttctgacattctagatacatctatatgttgggattctccgtccacccagctagggcattctatgaagccaagaatttagttctaagctcccaaaggaagctctatttcaaaaagccgggtggctttatttcaaattgaagaggccattaaattcacaatattttgccaaatgaatttctcagtgatcctgagcaatcctctgaagtcagctgtccttgtgcagtcatgggcccagcacagagcaggcgtacatactaagcacctgttccagcaggtagagacagtgtagtgactgggacaagcctctgccctcatggatccagcactccttaaacaatttctgaagaaactcaggggagccagtgactggtacattctctgtttgagctgccacaagtgctgcgggatttttcagtgctggaaggggtccccaccatattagcaacaaggtatcaagtgccaaacactgtgcgacatcttacctaagttttcactgggcattttctgtttagtaagtcaggcactgagggagggaacatgtgacatgtccaatgttcagcttggcaaacagtgaagagggggtccaatggggggcagggcgcaggtggctgggatatggtgctggagggtctctccacatagggatacaattgggtagcatctccatcagctgacgtgttcccaattgtcctttcttggttatctgcctgcctggcaagaatgtgtttcttacactgccgccatgagcttacacttcactcactatacaatttattccactcacttttcacagtgatagcaggttgcccatatggctttatctcttctggaaagggagagtgagcatgtcccttgccccatcaccctccagatatggtgtctgtgcagctggcaggattggaacccagttctgtttcactgctcttcaagtgtaaccttcatcatagtctacaccctgcagaggagaagccatggagtgggaaggcagtgatggggaaccgagcaaccgagaggggtgccagactagcccagatccttgcaaactttcccatgacagccctgaaggcagaaaagaagaaacttttacctcctacctcagggagtctggattagaatttgaagcaagccttccacaagcagacagtttctttatatatattttaaattttatctttttatttttgttatatttttagagacagggtctcactctgttgcccatgctggactgcagtagtgcaatcatagctcattgcactatgatgcaatgaactcctgggctcaagcaattctcctgcctcagcctcccaaatcactaggtattacaggcatgagtcaccatgtccagccaggaagcttctttaaattgttgcattttatcttttaaaatatgtatgcatattttattcctcctcatgacaaatgtgattgaatacaaaataatattcattcccaaaccttcaagaagaactggttctccaggaaaatgtgccatgattatactgcagcttctagcattccctgtgaggctctgggctgtgcacctctaatgctggaaagtccaaatccaggagactcgggtctcctgagattccttggccatctgttcattcatgccatccactcactgattcagggcccagaggagcaccagggttaacggctggcggctgagtcagcagctctcaaggcaatcaccttttccacctactcatgaatcactaacctgctgcccccttgctacgtgcctggaaatgcataaatgtgcttaaaataagtggtacctgggtagcaagtttctcaccagcaggaaccagtccaagtgagtacagggcaaatagcagtgcggggtgaaaataaagactgactaccactggcaacccttggtcactcttcatttattcatccaacattgctgaatatttgccctgtgcaaggctccatgccctggcaatggggggcacttgaaggcaaataagagctttacaaggctctaggagatgtcactagtattccaaaaaccctaacagaagatacaaaagattagtgccattagagaggaaatggggtagaagctttggttggggggaagctcattagttagaggagagagatgttacttctaacttagaacatcaaaaacagaagcttcctggctttagccccaggccatgaagaatgagtggaatttcaggatacacagacaagaaagcagaaaagataaaatgaactcccacataaggcaggagataggggtgactagttatgtgggttgcagcccaggaacacagggaggaatgatggagatctttgagcaccaagaagagaagtttggactttttgttttcctttggttaatgaggagccatgaaagagtatttgtggaggaaagtgaagtaattagctaacatttagaaagtttaagtgggtagtaagatgtatgactaatcagaaatgacagagtcacgagaccagctggaagagtactgcaagagtccaagcaagcagcaatggaagcctgaactagaaaagagacagcagcagtggagaagagttgagccacgaggatttggcaactgactagagaaggcaccaggagaagcaagtccctgaaaaccatgctgcttgggaaagaccaactctttctctcatttcctcttagggaattgtaaaaggaattccctatcaccatttaaatttggttaaattcaccaaagagtgatggggtgaatcactctttggtgactaacccctctggctcttgtgtagagctaattagagtttcttctggaagatctgaaaccaccaacagtgagactcctcagatgaccctgatgggcaggtccatgattcaatctgtttcttccagcatctccccactggctgcagcacatctaggggttcaacctaagggagcccccctactctgggtatggttagagctcctttcaagatcattctaatatcaaaagagggaatcttcaaggagccttgttggcttcttatacttagagagaaaccaagaacacagtcagagttgatgtttttaaataccaaatctgtatgcatctatcagagagacagagagagaaagagagagagagagttagagagagacagagttttgaaacatggagagagggaaagagagatgttcctagagagagagagagagagagagagagtgtgtgtgtgtgtgtgtgtgtgttagagagggagagagacagagagggagagagagagagagagagagagctttgaaatatgaagagagagagggaaagagagatgttccgagagagagagagagagagtgtgtgtgtgtgtgtttgttagagagggagagagagagagagagagagctttgaaatatgaagaaagagagagaaagatgttccgagagagagagaaagagagagagagagagagtgtgtgtgtgtgtgtgtgtgtgtgtgtgtgttagagagggagagagagagagctttgaaatatgaagagagagagtaaaagacagatgttcctatgaagccctcagctcctaaccctctctctggctcagtgtttgaagcccctccagccgcccatggcaaaacttccttccagaggagcaggccatgcatcccagacccatgtgtatgctgtcccctaagaatgagagcagtgctctgtttcccaaatgggcaggggaagcaaacttttgtttccatagtctataaaacatttttaaatttaaaaacaaatgctttgcagcctctgaattattagttttttattaaaaatacaaacagctctatggaacaccatgggaaaatgaggactcttgcaacttcgtttggctccctgttaaacagaataatgttcatgaggaagaaggtactgtttgttccttaaaatgttgtattgcgtacaatggagaagagcaacgtggagatgactttccaatgtgttcccttgaaatgacctgaggaccgaatcaggaagctcagtctgaccagctcagcagactacccccactgccccatcccagagctgaacttgcagtcagccctgataaaaatctctggactagaaccagagcaccaatatcaagggattatccatgaactgactgttctttcctgcaggcaggctccacgctcctgggtggccagagtgccaatcagccctgtcccagtgctctaacgaggtgcccattcactgcccaagagacaacatgcccaagctatgacccagctccaagatctgaagggaccagactgccttcctgtttttctctgcatcccctgagctccctcttgaaaagggaaggaaagctaacagaaaagccactttctcacacacttttggtgagatttcatgaaagctgcatgacctttctggaaagcaacttggcaatgtatagagaatcttaaaaaacatgtgcatcctttggcccagcaattctgcttctaggaatctgtcctaaagaaacaagtctgtgatgtaaataaaaatggacatattcagttcttgactgcagtgcaacctgaaacactgaaaaactgaaaataactcagaggaccaacaatagggagatggttaagtaaactgcagtgtatctacttgggaaactaatatgcatcatttaaaagcatagcttcaaagaattattgataaaacaggaagatatttatgtatgcatctaaatgcatagagaaaagagtgacataaaacattcaaatatgaacagcaatcatctctaggatttaactgctgctttcatttttatttgattttattttgagacagggtatcactgtatcacccagccggcaatgcagtggcacgatctcagctcactgaaccgcaaccccctgggctcaagcaatcctcccacctcaacctcctaagtagctgggactacagatacgcatcaccatgcctggctattttttttttttttttgtaatttttgtagagatggggtttcatcatgttacccagggtggtttcaaactcctaggctcaagcagtctgcctgcctcggcctcccaaagttccaggattagaggcgcgagtccccccactcagcctgctttgacttttatgctctttttattgtggcaaaataaatatcacataaaatttaccattggaaccacttttcctttttcttttttttttcttttctttttttttttttttttgtagaggtgctctctccctctctctctctttttttctttttgtaaaggcatgatctcactacgttgcctaggctggtattgaactaagtgtctagttctatagcacgaagtacattcacattgtggtgcaactatcatcaccatccacgtccagaattttttcatcaacccatggtgaaaccctgtaaccaaaaacatctccctattccctccacctccagcctctggccaccaccattcgctttttgtctctgtgaatttgcctactccaggtatctcatataagtggaatcacacagtattgtgttttgtctttttgcgactggcttattccacttagcataatgtcctcaaggtgtgttcacccatgttgtagcatgtggcaggattaccttccttttcaaggtagaataatcactgtatgtctatgccacattgaacggacatttcagttgattctacctcttggttactgttttttgttgttgtcattttgttgggttttgttgttgttgttgttgttgttgttgttgttgttgtttgacagagtatcactctgtcacccaggctggagtgcagtgatgcaatctcggctcactgcaacctccgcctcccagcttccagtgattctcctgcctcagcctccagtagctgggattacaggtgcacaccaccatgcctggctaatttttgtctttttagtagagacggggtttgaccatgttgaccaggctagtctcgaactcgtgacctcagtgatctgcctgactcagcctctcaaagttctcggattataggcgtgagccaccatgcccggccctacctcttggttattgtgaataatgctgttatgaagatgggtttgcaaatatcgttttgatttcctgcattcatatcttttggttatataccccaaagtggaactgctggatcatggtaattctatgtgtcatattttgaggaactgccatactgttttccacagtgaatgcatcattttacattcccgccagcaatggacaagggttccaatttctccacatcctgtcaacacttgttgttttccaacttttttgataatagccatcctaatggatatgcatttttatgcttttatgtattttcagaatctccttcgggaagcatgtggtatgtttataataagaaaaacaaaaattaacgttatgttttaaaactgtgctagggaatggctcactggatgttatccactttactcctcaatgctgctgggctaacagtcctcctcccaccctcagcaaggcacagctaaattctggggatcattagttgtcaaacaccaactctatggcaagtggagtgcaagaccctacaaccttatggggctgatatcataacccaattagcacaatcccactgctgctgcttggaggcctggttctccttccatgagtgttgctcctttctccccactcctaccccccacttcaagctccaagcgatgacaggagtatagaaaggaaagaaaagagatttggggattcacacagtcctggggtacaatcgcagctccacagttgctcagtgataagataagcaatgtcaccttcctggacctcagattgctcatctgctaattgggtgatggtatcaggttcataagtttgtagggtcttgcactccacttgccatagagtcagtgtttgacaaataaggatccctattcatttctggaattgtgcatagcttctgccacaggaagaaatacagcatacctactagtaaataccacttaattgactgattgaaagaaacccgtcactgtgaggatcccaattcaattatttatgtcctctcctggaagcctctatggagtgcaggtttctcaaacatagtcctgttctcttctcctcaaacaaaggatctcaggatcaaataagcctgggaagcacaaagattgttatcttcaaaaacagcaaaagaataataattaacatatgaaaggtctgtaaccaagaaacctatgtttctctggcaagaccctgtctctacaaaaaaaaaaaagaaaaaattagctgggcatgggggcacacgcctgtagtcccagctacttgggagcctgaggcaggaggatcacttgagcccaggaattcaaggctgcagcgagctatgacagcgccactgcactccagcctgagcaacaagaaaggccctgcttctttagaaaaataaaaaaggagaaacctatgtttctgaaacatattgaccactgaacacctttttggcataacgccaattaacaacacatggagatgactttccatgtggaaacacatggaaataacatatctccaacacatggagataacgccgattaacaacacatggagtgagcagtgctgctccactcctcatccgacctgaaacctggaagtctggttcctcaaggacatcgagccttgaatttccacatgcaaacacctgtgagtatgttggggctgctgcagatcagcagtctcaaaattcatagagcatgagaatcaccaggaaggcttgttaaaccagcgtcctgggccccagcctcagtttctgattcagcagctctgggctgggacccaagaatgtgcatttctaacaaattcccaggtgatgctgatgctgttgacccagggaccccattttgagaaccactgatgcagacagtcaaaaacccctcacatacaagtttaatacaggaccatacaggaaatctgtctactttctgcaatgccaaagaaatcaagtataattcagaacttgaaacatccattctcttctgggacaagttcttaaaggaagcatttcatagtagttaagaaaatggactctggagtcagaaaagagcacgtttgcaagtcccagatctcccagtgcctggctgtgtgaacacagcaagttattaaaacttcccaagccacagcctctttatctctaagggagagaaaatcatggcaatgcctagttcatagaatttctgtgatgcagaaataaagcaagcaggatgcttggggaatgcctggcatctagtaagtgctcaataaagattggttattctttttaatgactgttatttaatcatcttatctggtaaatagctcatctgcgtactgtcagctgacctcaggatgtgactatacagtcgtccctgtcatgggcgaatgcaggctgatggcacaggggtaaaagaatttaccaagaaaatcataggtcaagaaaggcagatttattagagaaagtggggaaatatgttgcctgagagacaatgggcaagttagcctgagagaagctaacttccagaagacaaaagcttgctgcagattttagagaatggaacttgggctgattgataatgccaaggcagcagggagcttaacttgcattcctctgtcagcctggatgtttgataaattgaggtgtttgatggtgagcaggaagcccgggagttatgtatgttatccgggcatgaaggccaaatgtcttgggtcatatatcctgggccatatgccctgggccacaaagaaaggcagacctgtaacttatctggtttctcttttgtttaaattctctggacgtgaagaaaggcagatttatagcttatctgctttatctcttgctttcccctggtcccaccagcctgactccttttccctaattaggactccacagtccccccttatccatagtttcacttttcattttttcagttacccacagtacagtacaatgaggaatttttgtgctctgtaatgagacagagcacagtcacatgacttttattacagtatattgttataattgcacaattttattattcattactgttgctcatctgtcactgtacctaatttataaattaaactttattgcagatatgcctgtgtaggagaaaacacagtatatacaggtatcggtactatccatctgcagttccaggcatccactggggtcttggaatgtaacccctaaagataagggcatctactgtatttggagacagggtctttaaagaagtaattaagttaaaatgaggtcattagggtgggccctcatccaatataactggagcccttataagaaaaggagattagggcacagacttacactgagaagacagtgtgaagacatggggagaagacagccacctacaagctaggcagagaggcctgtgatgaaaccaaccctgtcaacaccatgatcttggacttccagatagtaaggactgagacggtatatccgacttgagccttaagtccaagccaccgttccactattaactcccaccaggacaagtgcagtggcctgaggggcccttctgcttccactcctgcccttactccctggccttactgttacaagagtgaacttcaccagtgttaaccagatcacacgcgtggctgcctaaattcctccaatatgtcacctaatactgagaaggaaatccaagctcctcaccatggccaacaaagccctgaaaaacggcccctgccagcctccccctacccagcatttcccccacccccaccatcaccacctcatgccctaaactccactcagagtggcgtttttgctgtttcagaaacaagcaagctaatccttgccaccaggcctttgcactagctggtgctactacgtggaacgctcttcccccaaatttcctcctggctggcttcctctgagttcaaatgtcttctcctcggagaggcttttcccatccatcacaaagaaaccctcagcatcatctcacgctattgtcttcctacaagttagcagtagcttatcactgtctccctgagagcagccaccgtagctatcgaatgcactgctgcctcccgggagcctagcacttattccaaggccttggagcttagtaaatatgtgttgcctggataatgtatgtgaaagagctttgcaaactgtaaagtgctgcataaatgtaagataatgtcacaaatatcaaaaagagccagccaaataattcaaagaaaataggaaacaaggggagaagagggatgaggaattcagaatgaagctgagagatttcaagtgatgattcaagaaataaaccaagcaaccaattttgttaaatatgtgaggccacagggcgagggaagcacaaaccactccaatgatccattcaggccatgtctgctccactcagccatagaaactgcataaattacaggcagcagcagttttcctggagccaggcagtagaacactctccttggtgccggcctgggaggaggatcctggcctggcaagcagggctgactcaagctcattgcattagccctcccctcctgcatctgggcccctctcaccgcagtgctgcctgcccaggacctgcactcctccagcgggcgggactgtgactcacagatggcctgtcactcccagtgccagcacagagcaccacccgtgcctatctttagaagtttcgcaggctgaaaaatcaatttgcccgcctggcacctgggtctggggcctccccgctaacatcagtggcaggcgaaatgtggcctcccctctgcctgccctgatgcgtcagaccttactcagggtcccgagggcctggcagtgccgcccaacagactcctgtgagctgctgcacccacaggtgtgctggtctgcccctcagagatagccaggcctcaccagaagatgcgggcaaacaccacgccctagaaaatactggcaagggggaagcgaatcactttgcatcctggctgcctgactggcacattccccaggtggtcatctggcacctaatccatgtgtggtcacagcaaactggcttgcccaggtggtacaagttcagcctcttcctccaagcagggaccagaggtaagagaacagcacacaactccacgccttaataaaaaggcccaggaggcagattcccaacgcagtgacaactcccagctggcccccaggcttcccaactactgaaaatggccacatgtgactcccacaagccaaagggaccctgtattactgggtatgcggagagagaaccatctcagacatttcaccatattaataatctctctttcaataaagactcgctgagcacctggcagtggcagggtgggtggaatagggtaagaataagctgaggaacaagagaaaggaaatctctggccctggccctgtactttctccttgcacctgtgggcgctctgtgctcagcctttgagatttccaaatcccctctgaccttctgcctcttcactcacgtctagacaccatttttacagaaaccaggagctactgcctgttttgtttttttttgttttttttccagtaatacagcctagggccctgcccaccccacctccttttctttatgagatacagtgaagtccagctgtcctgcagcagatgaaaacagagagagggctctcacccgctagctctagttgagaaatgagaatgccccagaagagcttaagggctcaaaagccatctctgagaatttgcagaagcacaatcctacatgtttgcttccttaatccaaaaaaggatccaaggtcatgtgtctacaggagccagcctgttacggtgagtgaggggtgctgcattcagcaccgggggatgggggggaaaggagagcgtgcaatggctctgcccaaaccaatcatcaccatgaggggacacaggcacacaaaggtacattttcaatcttttattttttcaaaaacagctagcaatccagatttttatccaaaatctcctttgtaaatataggcaattgatgaaaaaaaaaattaaaaaacaatgaagccacatgggctaaaccaaacacacctgtagactgccagtttgtcccctctcataggtaggatggggtgactgaattctggggagcacgttcagaggtcgctatctttctctgcttctccccagagaggtcttcctaggctgcctctcagacacacagcaccagccagagggcaaggaccaactgataagccaggaagtgtggctcccatcactttgaggagggaatcaggaactctttggaaacccctgctgtacaccttgctggtgccatttcccaaatatttgtggttcacccctcggctttcagtgtctctttccttctctgcctccccacccagggctaactcctctccttcctgaagactctgttcaagcatcagctcctccaaagagctgcccactaagcagtgcccctccctccagcccctgggctgggaggcttcccggcacctggcatatcatgcactctgcatgcccacacacaacttccaggcacttgattgaccctcactagcagggagctcctcaagagaagggctggttctcttccatccctgttatccctgcagccagcgcagatcttggaacacagagcagctccacacagaactgaaccagcaacttctccaggagcaaatgttttctgagcactggcctataccaggtgcatgcgaagggtgcataaggccactgagatgaatttgacatatccaggggcttcagaggatcacagtctcttgggtctgacagatgtttaagaaatccccatcatgtagagtacccacagcccacccccctactccgccccgccacagccaccctcctcccatccttcctgggtcttggccacacttgctcttccttctgcctgcaacatggccctttcctgaaatctgctccaaactccccttaacaaagagctttctctccatgcaccctccatagcactattttttcccattccctgtttcatttgtgcttgtgcacttatggccacctggcttctcctgtttccctatttgtcctgtctgtggtctgtctccactactagacctaacccaatgagggcagggcctgcatctgcttcgttttctgcagtatgcccggtgcagaggacagcgcctgacccatggtaggtgcacagtaaacagtggttacccgaatgaatttaagaatgagaaagtaagatacgttccaaaagctctgcatgctgcaaaggcctctgagcctctatatgctgagaggcagctggacctctgcctcctcctttgcacggtgggcagagcacctgcagaactttccacttctcatgcctcatcatgtgtctgggctccggctccggtgctgcaaagcaggtgaagggccccctgtgcaagtgtaagaggctaaaacgggggtgcctgtgtgagcggctggtgtggggtgggcacctgccggtgtacgggagactgaagggtggagagggcctctcatgcaggcatgtgtgagcagctgcaggtgtgtgagcaaatgtgcatcactggggaacaggtgtctgtggatgagggaggaagtgagggtgagggtgtttgtggacatagggatgtgtgttttttacaaaaaaaaaaaaaacaaaaggtgaggggaagccggcctgcatacatgtgcatgcatgtgaacatgcgtgtgtgaatgtggggaagggcgcattggtgaaaaaggtgctggtgctttttctccctgatgcaaactcaggctggagagactgggactaggcagaccctacccttggcactccaggaagagttcctccctctatgaagagctgcctgacctcattcaaggtgtacagaaagaaagcagtgtcaccggaacccaggcctccaccataaatgggccagaggcaattccacagcagtaaccgggcaggcaaaaccacccctggaaaacacaagctgacacgaaggatgagcctctcaggccccctgggcgtggggtccctggaatccctctgtccctggctcctagtgattttacaccaaggctgaacacatagatttgaggcaccagtgcagtgcaggacatgggcgtgttattaccagctccatggttaatgagcattgcatccactgggagcagccaggctggggatgctaagacctgctgggtggttctgctgagttggggctcatggggcaagaaggccagtttctgccagcccctcccagcagcagtgagacaaggacacagacactgaagggcccgtgttctcagcctctccccctccgactcctgcccatcttcctggtcacatctcctcccaccgtctgccttgcttgctgagtccatgcatttgttcatttccccattcaacaaggaggtatcaagcaccactatttcccaggcacattcctagggtgtagaactgaaaaacacaggtaaagtactgcctccatgcaacagacattgtagttgaggaaacaggcgataagccaaactgataagagaaatataaggtgtgttaagacaaatataagatggtgacaaatgccccagagaaaataataaaatagggaagggaggcaggaagaggggccgttaatcagggtagccaaggaaactctccagcagccagcctcgttccctccccagaggcttcacagctgctgttccacacacctgaagtactgttccctcaaagatcccccatagtttccttttccaggcaagttgatcttgttccactcattggccacttccttagaaagaccctccctggccaactacataaaacaggttccccattgcactcacatcactatccccttagcctgtttcatattctaaaaccagttctcattatctgaagttagtttattatttatttactatgtttctgcctcccccagtgaaatatgaggtctcaaaggagagaggatgtgtgtcttgctgaccactatatcttcagcacccagaacaggccaacacatggcaggccctgggactgaaatttcatagtccacttcttgttcctttgggttaagcaatgccctcccccagcatccatttaaaaatactctcaggcaagtgatacatgaagtcatgaacactctagtatgaatccgtcacttctctctaggggctgctcagaaatctaggagcacgtgttagtactgagggaaggggacagggccgaaggaagaagcccacaggctgcctgcccaagcacaggactggaagggaggaggcctgggtgtggtgccagctctgtccccagcttctgggtaacctctctaagcatccgtttcttcatgacttagagctgagagggagctcttggtcacctatgctttggggactccagcggggaggaaatgagtcaattaggaggacatgaagttggctgcctcctcactttgccatcaaagacaataggtctatgttctgatccctgcctcagacaaaatggagaaaacccaaagatagtgggaagccgcctgcactgtatgaatgcacgcttggagaagactgtctccctgctgcccagcacccactgtccacgcatggttactattagaaagttaatcatggaaaatgctgaggtctctttccccagccctgcacctctcagctccacactacaatttcatcttccatatagtgttaccagacagtgccattggctccgtccactcacttgtcccaggcctttatgacctttccattcaagccacacaccacgtctgctccacagagctgtaagacacactggcttcagcccgcctggcctgggccagcacgctgacattttccatgagtccacatcagccagtgaaatgctcagaggggattaaggcaaccttctccatcacccccgagttgctttaggaaagagaataacagcactgacccctccattggcagctggtgatatccacacaccatctctatccagagatgaaaggctccttctccatccttgacttgcaaaacagggattatttcccacctcacgctttctgaaatatcaccaaagatgcagctgtgtttgaaggccagcctcataaaaggcgtaggacccacgtgtcagtcaacactccactgagaagataattgattttttttttgttttatgattatttgcgggcactggttctctttccattagcctggataatcgagggaagactgtaaagagtattaatatcacggccaaggtcactcagctggctcctgctgccattccaacccaaaggctgaattactatggcttttactaataataacaagaacaataaataacatgagtgattataaagccagggaactctgcaattacctcaacaattaacacatcccttcgtgaaacacagaacagaaaaaattttcaaaggttcaagttagaaaacttctgcattctgtttggtgcaagtgacagtcagaaaagggccttgtttgagggtatgcagtgtgagagtatgcagtgtgagggtatacatgaggtctgcagtatgcagtgcagtgtgagggtatgcagtgtgaggtgtgcagtatgcagcgtgagggtatgcagtgtgaggtctggggtatgcagtgtgagggtgtgcagtgtgaggtctggcatatgcagtgtgagggctggggtatgcagtgtgagggtgtgcagtgtgagggtgtgcagtgtgagggtgtgcagtgtgaggtctggagtatgcagtgtgagggtgtgcagtgtgaggtccggggtatgcagtgtgagggtgtgcagtgtgaggtctggcatatgcagtgtgagggctggggtatgcagtgtgagggtgtgcagtgtgaggtctggggtatgcagtgtgagggtatgcagtgtgaggtctggggtgtgcagtgtgaggtctgggatatgtggtgtgagggtatgcagtgtgagggtgtgcagtgtgagggtatccagtgtgaggtctggggtatgcaatgtgaggtctggggctggctccagttggtttccaactttaccaggtgtgtggcccgggcaagtcacttcatctcagcaggttcctgcacataggggctggtgaggactcaaggataaggcacactaaagggcttggcacagtgaccagcaggtagcagcactctctaagtattagctgccattgttgtctttatcattaatgtaactacatcttaattaggaatgatgggatctcatttggcccccacaccaatccaggaattgagatgagaatagtgtttcctctaccatccatcagccaatatccagcagccaccccaggggaggccactggtcatcccacgccatataaagttcactgcccctggatggtaggctcaccccaagcctgctccctcatcctcattcccatcctcaacagagaggaaagtccaccactgtctccattttaaagaggcagcctgtgacatccaagagaccttccagcctcagggaaaggcgtgaacaagagctccagctgggtctttacagatgaagccccactttggtacctcttctcctaacaaccccagcttttggaagacatcaaaattccaaaggctcagctgcagaaagatcttccaaatttctcattatagttattccctgaaaggccaagagctttattcttcatccatttactcaacactttcatggagcaactgctacgacgtgtcagcctctgcaggaggcagctttaaactaagtgtgacagatgagaaagaaccataacacacaaagcagggagaacagtgattccagccaaagaaaacagcatgtgcaaaggccctgaggtgcataaaatttggcatgttctctgtggatagggttctaaatcatgtccaggacagggggacacctttgtgtcaccctcatctgaaagcaacctttaagaagccacaggacagactgtcttcaactcagaaaacctccctgatacccatcttccatcctccacccctacattctcactcttgtctggtttcctcagttaccatcctggtgcctaatttctggtggcagcaaagtgcaagattagaggcccacacactagtgcccggaagcttgggcttcaatcccagatccgccaattatggcttcagtggtttggggcaagtgatttaactgcctctctgtgcctcagtttcctcatctgtaaaccatggataacagagaacctctttggagatctgctgtaaggatcggacaagtaaaaagaagtgaggctcttggataaataaatatctaaggcacatagaagttccctgaaaatgtgggcattatcaatatttattttaagcatcatcatttttcttattatattccctttctccatctggtcccttgagagtgatgactcggttgaatgaatgacacccaccccagtttctcaccccatctcccaacaccaggatccttttgcctagtgggtggttatcacttagatgtgcccatccccaaacctcacttgatatagtgatttctggagaccctaagaggactcagggaccaggcacggtggctcatgcctgtaatcccagcactttgggaggtcgaggcaggtagatcacctgaggtcaggagtttcagaccagcctggccaacatggcaaaacctatctctactaaaaatacaaaaattagccaggcgtggtggcaggtccctgtaatcccagctgctcaggaggctgaggcaggagaatcacttgaacccaggaggcggaggttgcagtgagccaagatcatgtcactgcactactccagcctgggtgacagagcaagactccatctcaaaataaataaataaataaataaataaataagactcaggggacttcctgcacattcccatgagccatgagccatctccaacaccttggggcagagtaggggactctatgactccactggggaaggggtcctgcaatggggcctgagatgtgctttcccccagctgacactcttttccttatttaactttttcaaaaactcccccaaatgttttgccttttcatttgcctcgcctcctccttaacactctccacctgccccaaaatccccagtagtttcaaaattgaataactgtcgggaacagcatttaaagatgctaatttaaacacacgtgtcagaaaaggcaagctggatccctgctcctagcaacagcccctcacccacacctcacagctgctgctgcccagaaacagggcttgcttgagtgagctggcaggggggccggatacagggaagcagagttgtgggacctagctctgagcctgcttctggcctttccccttggatggaggtctttatccttgcagggcagccttcaaaggtgcaaactctgccaagctgccaattcctcaagaaaggggtcttggggcaaccaatggtttaagtaaacccattgtatcacattttgaacatacagaactgctaacacagagacctctaatttcctttaataaacccaaactcttccatttgagtaagcttcatacattaaatagcaacacctactgttaaagcataacaagtctcctttccatttttcacatcataaatgtaagtttgggtcccatcaaggggcagattcctctaagtgccaatgtaaagtgccccctcctctatgtagtcctcctgaatgaccctccatgccacaggtgggagtggtcttttcctcccctgaactctctcatgctcttcccagctatctttcattgtagcaagatcttggtcaagctcatgcatagcttatctccacttctagactgggacatccttaagaacagaagctatgtcttactcaaccttggacgtgccccccccccttgcaatcacaccacagaaccgcatagtaggtgcttaataaatagttataaattattaacatcagtcaccttggagctctccaatttaaagaaacagttttttaaaaatatgtatagtaagtagacactgccccaatagttggtcccattggtaaatatagcttttcatgtgttgggtttgcttcaaatggaggtataaaaacacacagaaagaccaagacagaagctaaaacatagggaatgcaagcctggtaacctctacctgggagagaaatttgcccaactgggcaatgtgcaggcaaggctgatgtcaagggaagatgctggagaagagaaatgctactgaaagagcacgcaagtgcctttgcatctccaggtaagtgcttatttcaagaaagtgtaaagcagctatgtttcttgatttggatgttagttccatgggtgtgttcagttttgaatatgcatatactttgtggtgtgttcaagttttagtatcatattatatagttcaacttgaaaagtaaaaatatttgtgggatctaaaaaatcaaattagagtagaaagagagttaccagaggctgggaaggggagtggcggattggaggggaggcaggatggttaatggatacaaaaaaatagaaagaatgaataacacctactatctgataacataatagggtgactatagtcaataataacttaattgtatattttaaaataacttaaagaatgtaactggattgtttgtaactcaaaggataaatgcttgaggagatgaatattcactctccatgatgtgcttatttcacattgcatgcctgtatcaaaacatctcatgggctccataaatctacacacctactatgtaacccacaaattgttttaaataatttaaaagcttttttaaaataaatgactaaacaatatttctcacatggaaacttatcctcgatgtccaagtgaagttattgtgagaataggggttgtggtgcaaaaattcactctctagagaacacagctgttaccacctataaagaaagcgaggtctccactcacaaaggaaagcagcaggagtatgtgagatgtcgaaggagaacgtggaatgcctaagtaataaaacagacacagaaaactttccatccccacggtaagagaagctttggcagagtttgctcttcagcctcagaccaacagagctccagcatccaaatgctgaagaagccaagaatgtgcaaactatgctctctcagaataataagaagaagaatattcccttctcctctgggactcttcaaatgttttgaagtttctgacactctcaaaaacatgcagaaaccgcagcctgaatttagaaacctcagcatggtggtatgtgtggtatgagttccaaattctcgacagccctagaaacctgtttctagaggagaaatgaaaataccaggcacactgatgcagcttgtgggttgctttattgctttatttagggtggcagctcgggactgagggacctgggtctcattatctatcagctacctccccactcacattttctgcaattgacatcatgcacaatgagagccacctagctggtaagagaaggctctaaagactactcagagggttatgcgggagggaagaggaggaaataatatgagcccatccacttcctctaaacactggggtcgagggctgtcatggatcacctgcacggatatgatccccggcctccctcagcaccagcaggctaagccgctgtcactgcctgaccccctaacccagtcaatacccaaccatcaagatcacagtcctcaaatgagctcactttcagtaaggtaccgtgttcgatttttctttggacaattttatctggacgatatctaccatgacttaattttgtagccaatgtatacacattaaaataagatgaaaacaatactttctggacctcatgcagttctaattaatataattccatatggatttatggataccagttgtgttctagacactgttgtaagtccttggaatcaggcagtaagaatatgaaaaaagagaccaaaatgagaattatctccagaagagaaagcacatccagcctggaatatgtccttacaggttggaacccgttctcttccagatgccttgaggcttctttaactttactctttctcataaccacccagaaagtgcagggttggagactcaatggttgatcaatacatttattgaatgaaaatgacaggccctacaagtagtttctggaagccctgccaacattttcccaccctgggttctggtactgctcccaggctgtgtggcattgactagagtgcttcaacggcccactggccccacacagctggtgcctggggcccagggtggatccatgagtttgggcaactcctcctcattcctggagctcagtttcttcatgtgtaaaatgaaaggattgaagaagattgtctctaatttcccttccaagttctagcattctgtgatgccatgtgcaccccagttaagtgagaactgccctttgctattcatggaggcaaaagatgtcaccctcctcctcgttactaacatggccccatcttgtccaggttcccactccttctccacagtgtcttgcacctcagataaactgaccccattccctcaccagctggtgggtcctgtctagtttacatcagggcattcccattctattgacactgactgatttggagccaggcaagtggcctggttttggtcaatgagaaaaatgggagaagtatcgggggctttggagaaagattttctctatatataaagtcctcaccagaagagatggtccctgccttgactctggacattgccatgtccagatgtgatgtccagaaccactgcagctatcttgcggccatgagagaaatcagacttggtataaagctgtcactaaggacagtagggtgaagaaaagaaagggcccagggcctcatccacatcactgaaccactgatccatccatagtggagcctttcctcccccaactctgttctcttatgggagatacatttccttactgtctaagccaatttgagtcagtgttcttgatcattagtaatcaaaagcatctaactaatgtagtggacccccaatttggaaagaatgaaaatattctgaaacactcaacactaaaactactgtacacagttgaatctttctaatgtctgagaaaatgctctacaacactatctggatggaggttaccctttcaaataaatgcctgacatcctttctttctcaaaagccaatagcatccagatatttgcacttttcggttgcttggtttctagacaaatgttagtggcccgatcattcctacaagaaatggcactgacttgcccttctccatggagacgatgagcacagccatgaactcaattcaaagagcagcagaagagtcaaaagtggcaccttgaaactgaattctctgttgtgttgattttctgagctttcaaagtgttattcatttttttctacctgtgaatgaatccttgatttctcaatctgcctactcgctgagatagatttcagcaaaataacagtagacatgggtttccttctcctctctctctctctctcttccccctctccaacttcccatcctccctctccatatctccccctctctaattcaccaaggtaacaaaagaaacaataattaagtcaatgagcatgctcgcatgtgcaacaaaaaatacctctcttattacattgccatttccttttcaaatcctttgggggcattgtgtacaaatatagtaaacagcattagagggaaataatgccgacacatacttctgggagctcgtcatgtccctttaagacaaggcccactgttcagttccattctaggccacagctcgggtttcaagcccaaggtccccttactgcctcatgcagtattaatatggccctggcatactcccaaatttacattatgaaccataatctgggccagctcccacaggacgaactggcttggggctcccctcttcatttccccagagggccttctccccatccatagccaggccacccccttccccagggatcccccactttcagcctcagccaggggaacacacaagtgcttttcaacaagtagttaattccctagcatggagtatcatctgtgggggctgcttacacaatggcagaggaattgcgctgtcctgcaggcagtcacagggggagaggggaagaaggcactctcagacattagagccagagccaactcagggtcacttctgtggcaggcctgaaagcaccaccaggatgtccaggccaggaggtcccatgggcatacccagatctgctgaaggaggcctctctgtctcttctctgtgtctcttcctctctctctccccagttataaccagaaggcaggtgcaatttctagaagagcccataaaccatttccatttattaaaagagaaagaaagagagagagcgagagagaggtgaggctggtggggagtgaggaggaggcacaaggaaggagtgcagaggggaggcaaggcaaggaaagaacacagggtggagggtggctgagtgggccctggtgcagccctcatccccaggggctggctcgggctccatgctgtgcgcacagcctccaaccaccatcaggaggctacaggctccatccaggatgttgtctatgggactcctgtctctgaggcaccatggggtgtgttggggagagactgcactctggacagcctgtctgggttcaattcccagaccctctactcacaagctgtgtgaccttgggtatgatgcttaaccactctgtgcctgcatctcctcatctgaaaaccaggaccaagaagagtgcccaccacctggggttgcttgtgaggatggaaaacaggacctggcacaaggtgtctagcccatgcctcagagcttgcacccaacagagcaagtaacaaggtcaaggcaacaacagagggtggacctgaaacacatcctcaagaatccagcaatttcctcaataagttaaacacagcattaccataggatctagcaatcccattcctaggcatataccccaaatcaaacacaggcctggcacagtggttcatgcctgtaatcccagtactttgggaggccgaggcaggcagatcacctgaggtcaggagtttgagaccagcctggccaacatggtgaaaccctgtctctactaaaaatacaaaaaattagccgggtgtgatggcggatacctgtaatcccagcaactcgggaggctgaggcaggagaatcgcttgaaccaggaggcagaggttgcagtgagctgagattgtgtcactgcactccagcctgggtgacagagtgagagcccatctcaaaaaaaaaaaaaaagaaaagaaaagataccaacaaaagctcgtacacaagtgttcatagcagcactattcacaatagccaaaggcggaaacaacacagatgtccatcaactgatgtatgaataagaaaaatgtggtgtggccatgcacagaactaaaggaacggagtactgctgcatgccacaacacaggtgaacctcaagaacattatgctaagtggaagaagccggacacaaaaggccacatatcctatcattctactcataggaaatatccaaataggcctcaagaagcagcaagcagatcacaggttctcaggctggatggaggagagaacggcagtgactccccattggtccagggtttccatctgcagtgctggacggttctggaagtaagtagcacagatggttgaacagaattctggttgtatacttaaaatctcacaatggtcaattttatagtgtgtatattttaccataataataaaaaaaaagaattcagaaagggcacagcactcagactcttctcccctgagtcctctcacgtggtgaagagccaggcaaaagggttgagggcattgttgttatgcactaagttcccccactgtgttcctgccctcccctctttttccccctgcaccactctgcctgtggtttcccagctcacctctgggcctttcctgtgctattccctctgccaggagtgcagcccctgccaccccagcaccctcccacctcagccagcctagctcctctcagcccttcaaacccagctcagcccctgcctgctgtagaaggctttcccttgttaagatctcctcctcagggctcccacctcactccccggcacctaccctttgtcaaagcaccatgttctgtgcatgctagacagagctccccacctcagctgtaagcttcttccatgcaagggccagatctaatttactcttatacccttagagccgagcacagagaaattatataaataacaaatgagttaaaactacagactattatctagaagtcatgagataggaaagaaaaattagttatgaagaagggactctcaattcctagataacttaaccccattctcacccctgatcccagaacctctccagggaaaagaatgaggacaccccaagcagagagtgaccaggccaaccaagagcccccacgtgggcctttgtcaggaaagtcaggggctgaagaaccatgacatcctaatcccagtttggagtggacagcctggccttggattcagtctccgctactttcttcaagggagccaagtactaggctctccccacctcttacctcattcaaacctgcagaggtaaaagccaccttatagaggaggaaattgagactccgggaggtcaggcgcatgccccgacaacaaagctaataatgttcaacaccacaggcatctgaggccaaaacttgtgacttttaaattcgtttcctcttcctccagcagtgtctacatggttgcctcctcaatcttctaactaacacgagaaggccagagacacaggcaatgctaaaggacagatccttgtggtgctggactaacccaccgaatgcagctgggtcctgttccaaaaactcacttcaaacaatgatgctattgaccaggatagacagagggacaaggaaagagagatccttggggaaagacacaaaatgattcatctcagccactgtgctcaactacttgtgtggctttgagtaagtccaggtctctctggggctttttaatttttcccttttgtaaaaaaattgtctaagtctaacataaaatgcagtaaatcatctccaaagtctcttctagctcttaggttctaacactattacaactaacagcttccccagaaggatctagaaaaagtggccatcttgtccacattcacttagtgcaagtcacgcctagagcagacagcgttgcctgtgagggtgatgcagtgcacaaagctaagtcaccatcaccttttctctgggagcttcttataccaatgccccaaacattccttgtaccaggacagacacaaagagaaagatgcatttattctgctcccaccacatgttctataggagacctgtagtgtaggtctcagtagtactccaaattctgtcattctctcccatcttcctgatttctgccccgcctgcctgcctgcactaatattcagtgcatattatccttgaaatcaacttgaaattgtctcgattttttcaaattagcattgtcctgggcaataatatctgtgaaatcacgagctctgatgtactagttctatttttccacaagtgtattcaaatacacaactataataagaaattcgtctgtgtccctcctcaaagcatcttgcatcccaccagcattgaggtgtggcaaaacacagcagtagctcacttagtctccaccagcaaacctcttaggccaaacaaagctgtttcctaccattttagaaaaaccgagacttggggaagcaagcgttcaaggtgacgcagccagaaagcaccacgcggggcttcaaacttgggtgtgcctgattctaagtcccaagtctttgccgctcttgtaagcatccagcttgtctacagcagatgggggtgaatgaaagtcaagagattgtaaataatgccaatgacctttatcacctattctacttaatcctgtcctaagaacttgacagcaagattttccacgataatctgaaatgagagtaattcatctatgcataaacaaagctgacagccagcatactgaaatggacagaaggagagcactgtatgagtccagaccagttagctccctgggcaggtgcccctcacccacgccagcaaggtcaaggtttattcccactccaggcaacgctgggttcaagctgtcccagttcagaggctgtaccaccgaccctgccagcgctcctgcaaatgcacagcttagtcacaagggactccggctgtgcatgtgcgtgactcagcacacatccctcagccctccaaggaaaacaatgacaagagcacatgggatcagcagtgtcatccgtgaacacagaaacacccggcccttcatgcataaacccaccaaagaaaagggcttccaacctagcctggaaaattcaagaactggaagggctggtgctcaaagtcatctggtctgacccctcacaagacagcaaggaaaaaccagagccaagaaagaggcaacaagggacttgcccacgggcactcagctgtgtcagtccagggctaaaaggaagtgcccctacagcttcctgcagagtcagcagccccaggcacagtacttctctctgcccacgtggcactgaggaaattgccaattacagagctatgccctaaattcaggaatcaataaagtgtaagtggagagcccagttacccatatgaattcaacaacaacaaagaaaaatgaagaggaaaactacccagctcattatctctctgaagtgttttccagtaacaactcaatacgaatcagaaataatctcctacgagaagcagcaactggggggaaaatgcactgaactgtgcttggagaaagaaggggctggccatgcattccagcacgatgagaatccccccgtgtgtcacgcaatatgccaactgcaggaggatcccccaagcaggcgtgtgctaacacgtcatttgactccaacacgagatgactttgagttcccaatgatgtgcgcaaaagggacagattctccccgccagtacagtgggctctctggaccttctgaccaagccaggaagggaagaggttggcagcagatgagggactgaccagcgaatgaaaacacagcgatgccagatgcaaaggacactccttgggtgggaaggaggtagggttggtttattttttcccagactttttcactcatttaagcctggagaatacctccctccaaattttatccaagaaccagccaatggccaaaccccactcaaaagagaaaacatgaacactaaaatattccatgtactgaatatttttaaagcaaagttaggattttctaggtttgtttccatgggggaagagggtggtaattaaatgatttacagaagaattttacaacctcttcattttacagataaagcaagcaagacataaagaagcaaatggttttttcaaagtaaccctgatagtcaatagcagaaccaaaaccagaatgcaagtgaaaaaatccagatttgccaaaaccttcctattggctctatgagagactaacttctgagtccgggctatcctgatgatactgacagggtccccaaaagctatcatgcctctctgagtatgttctcttggcaacctgaaatcactctcttccttagctcctctaccatctgtaattaattattctataacttttattgaagactttctcccctgcaatagtagaagctctactattatgctgggaacataataaatgtttgaaaatatttgtagagtgaatgcatatgtatttctgacatatgaacactcgtgcattcaacaaaccagggctgaccatccagggcatgacagtgctttcatccctcagtgttgctaacatgcccagtgttgagacaccccaacaaggtcatactacacatgcaggggattcaacaaggtcagacacaaccagagccccaaggagcagagtctactgggcagactagccaacacacagaagcggctgcatgacacaggagaaagggcacccgtgaagctggagctccgggtctagtttcccttccctagtcaatgattacatgacttaggacaaatcatttaacttctctagaacttgtctgcttcatttgcaaacacaagccaaacaagaggaaggcaggcatcccgggaggaggaacagtaaatgttggaagtaaaagccctaaggatcctaatctccttgagtacagggaccagtctttcttcccgcatcccaccactcttccccagatttgtgtgccaggctctgcccctcccccacctccatcactgcccggcaagagtcaccaaactctgacagcattattcttccagccactgacctccaaatatccctctgataaaatcaaatcctaacaaaggaggatgaactccccctgcttaggctttgtgggagagaactgcctgttgctcattggtaactcagggcagaaatatcagaaggatgaactgtggggaggctataaatgtgtgactgttccttaccacctcatggccacctgtactgtctctatagagccaaagctctaaaaggtactcatttgtcttagctccatgcctgaatgttctactcctgattacagagggagaacccttccctctcttgctccatctatgccaaagctggcccactatgctgcttggtgctggcctctaggccagcagcccctgccaagggcacacttgagccaggcagccaggtaactccaggccaggcttccccctcagggcgttaccaggctcctccccagcttctccctagcctggcaaacatccagccctatgctcatcccagaaacctaaagataaaatcattaggaaaacttctagctcagagatgattattgctatgttatttataatagccaaacagcagaaacagcctaaatatcctacactagagaaattatggtgcagccataccaagtagaatgtagtcataaaaagggtttacataggagatgtttgttatagtaactgggaggcagaaggcagcatacaaaattggcagagggtacagtcagagctaaagaagttgaaataatttaaaaaattggtacaagcaggcttaaagaaaatgcatcaaacgataaccaactggtgtcctaggaagaaactagatacgaggtcctttctctatccacgtttatgtgtatttattatagcgaagcataaacattaccactgaaaagcatctcatttttcctgaaggaacctaatatactcaggaagatcagggatttgggcatcaaaagttctgggttcaaggtccaggtctatctatacaataggcacaaaaatacaggtagatggaaggaataagatctagtgttcagtagcacaacagaacgactacagttaataataatttactctacatttcaaaatagctaaaagaaaatatttgagatgttcccaaaacaaagaagtgacaaacgtttgatcaatgttctttctgtttccagcctacaatctatacctacaacccacagcctacaacccatacctaccatttacagctataacctacagcatataactacaaactaaaacctacaccctgtacctccaacttataccctgcaacctacaactgcaatctataccatatatacctacaacctataacccataatctacaacctatatctacaaccacacctacaaactacagggatgctataagggtcgtggagattcaccaagtgccaatctttacatgaatatgttatatgaaggtggcgcatgaattataatttcttaaattctacacacatgcacacactccagtagcaaccacacatcagttactaagcacatcttaattccagaaggacgctctaacatcccaaaatactccaaccagggctcaaaagtcaaaaggtcccaccattgactcctgttcatctaccccacatatctcaggactcatcagatttggtccaagaagtttattcccctccttccgaaaaatacggatggaagtagttataattcagttttttaaaagacagctattatcaaaaagtctgaaaataacaaatgctggcaaggaagtggagaacagggaacattcatacactgttggtgggaatgtaaattggtacagccactatggaaaacagtatgaaggttcctcaaaaaactaaaaatagaattaccatatgatccagcaattccactgctgggtatatacccaaaagaaaagcaatcacacagaagagatctcttcactcctgtatttattgcagcactcttcacaatagccaagatacggaatcaacctgagtgtccatcaatgaacaaatggataaagaaaatgtggtacatatacacaatgaaatgttattcagccatacaaaagaatggaattctgtcctttgcagtaacatggatggaacaggaggacattatgttaagtgaaataagccaggcacagaaagacaaatatgacatgtccttactcatgtggaagctaaaaaactatctcatggagcaagagagtagaatggtagttaccagaagctgggaagggtagtggggaggggatattaagagggattggttgataggtgcaaacatacaggtagatagaaggaatacgatctagtgttcagtagcacaacagggcaactgtagttaacaagaatttattctacatttcaaaatagctagaagagaatatgtgggatgctcccaatacaaagaaatgataaatgtttgaggtgatggtatcccaggtgcccagagttgatcattacacattgtgtgctcacagcaaactatcacaggggcctcataaatacataaaactattatgtatccataaaaattaagacaaagaaaggaaaatgcactggcatgtgtattttgcggaattatttggtttggcaactactctttgtctagagatggagtttagaattgtccctcaggtttgaggccacagttcctggcatctcggagcaggaggacgccagcatccttcttgttagaatcagacagcatgggctttcccagagcttacttcctgctgtggtctttcttcccagtgttgggagaattccctcacttcactgatcttcaatatcctcattagtgacagtaatgccaatatttttatcatttagaatgtgctagatacaaagctaagggcttcatacctacgaactcatctattctgtgcaacagccttactatgaaaataacattaggtacgttgactgcctcccccaggtagagatgaggaagtagaggcacaaagaggtgagtaacttactcaggttcccacagcttgtgggcaggatgttggggttggaattgggtactctgtctcccgcactctgatatgtctgtcagctggaagcaaaaaggcccacttcagaagtcattgactaaattttaaaagccaatgatctaaacaccatagtgcaccctcaattggtgtcatcactggtctcctccccagagctgccaacatccacacctttctctcaacagccatttgaacacagggagaacacatgattcaccacagccaatgactgggaaaaaccaaacacaaagctcaccgcatggagtgtgatgtcttgtgtcccattcatttcccagtgatttgcaggaccttgtatggtgtctgggaaaaatgtgtattgactttagttcatttccttcgtaggttcagcctcttattattttatgttcatatttattttccagagatagccctaaacacgggacatcaccagttccagtgaaatctccagggggagtacatagagccccaggacagacaggaactgtgtcacctaacccaacactcccaagacttctgaatgctcctagaaccaaactcctcttctgctccattgcttcccctccacccccctgctcctttaatttcagtgacaggaaatgccttccgtttggtccatcctatgtcatgcatcactgtgccaactcaggggacacattcttcagccacaagaacaccaccccagcagaaccacattgagcctacagtgcccacaccttgctccaaaagtcacatccttgcccccacccagggcccaccttccccaaaccatggacaaatgccagaaccaggcctgagaagggctctttcagagtccaagacacatgagcttccttggaaagcatcttccctatggaaattccccccatgactgcagaaaaattaaaatcactcagaattctctatttcttcttagagtttcagaattgacttgaagacacctaaaatcctaatctcaccaactctccatctcctcctctgcctctaaaggaagaaaaaaaaattttaaagaatggacctagcattgagaaacagagaacaatctattattgtgactataacaactcctaaggagccatcagagtctcggtggcaccgctggccccatcgtcacccaaatcatcacagtgggccgttcggactgcaacacgctgcctgctcctcccggcgcacattcttcctggctctccctcactgattttttggcagggctcagcaggaatggaatgggcttccacgcccgttatgatgatggatgggcaggctgctggtggagtggggcctttggggaggcactgtatacacacgcacatacacacacactcacatactctcacattcgtatactctacacgtactctcacacacactctcatattcacatactctacacacacactcacacacatccacatactctcacattcacatactctacacacactcacacacacccacatactctacattcacatacacactctacacatactctaaacacacacacatacactagacacactcatactcacacatactctcatattcacatactctacacactcacaaacacacatatactgtcacactcacatactctacactcacactgcatacatgtgctataccctacaccctacacatacccatacacactcacactcaaactcttggccagcagcacccaggtgaatccactgtggtctcgtgggccaggattctccccaagatccttggtcgctgaagcagccccaaacccgctttgtctgggtctcttccaactctagagctttcattgccatcattacccccagctggacttctgagtcaaccagatctgagttagaatcccagctccacagcttactagctgtgtggccttggcaaggtcacctctctgaacctcaatttcttcacgtgtgtcttggagaatgccagtactaaactcccaggctaatatggagtcctcaacagcccagctagatggtgagtcccatctatgatccatcaatggcaccccctcccccaccttggtccctctgccacagactccatggatctccttaaaacctaaggatatggagttaaaatctgacccaacagagggcctctatgaacctgttctcgtgccacaaaaggcatctaatcccattgctccctgcctgtgaagggctggttgtcaagactgattcaggggacagtgtgtgtggagtggttagcacagggctcagcatgaaggctctgcatagtaacagctgcctctgaggctaggaggctccgtacataggtcccccctcctgctgagcagtaacctgtctccttcatgtcaccacccacggtcctacatctacccaagaggctgaacacactccaatacaggctggttggtccgggaggaccctagggaagaagctggagactctgagacttacaccattcataaaccagctcccccaccctaggtaagagcatatgtctctgaggaacccacttttctcttttctgttccctcaagagcctgcaaggccattctcttatttgccattcccaacttcccaatgagctagcatgataggtactaacgttctgcattttaaagacaagcaagcacctaagtcaggttgcttgtccaagataatgcagagatggagatgggatcaaaacctatgagtcatctcccaacaacgtatccactaaaatacctgcaattctagttttacaggtaagagaatagacatgggtgggataagtgagtggcctggggatacccagataatggagcatggaggtgaggcagaattgagcttggggaccgaaactctatcctcttaaatggcagatttgggagacattccctcaagaatgaacccagctctggcagggcccctcatccccaggtgtccccaccaaattcctggcccctgctattttggaagtctatcagagatgggcaacacagacactgaggagccacgggtgaattcccagccctaattttctgttctgtgctcagtctgtgggccctgggcttgggtatcgccctctctctgcagagtgtgtgcaccacccaccaatgcaaatgctgttggccgctgggagaaagcaaagcaaaacttgctgccagcccagctctgcttcgtaatctgccctttgcattgctggggaagcagtgggaatacagttgcagctacctgatggtacatctaaaaaaataaccagctaaaggggcccacagactcccacctgtcctctcctacccaccactctgggagagcagcgaagagctgctgtttcttttttctcccaccccaaggaaatcaatatgttgtgcaaaaacaactccttccagcaaaactccactttacacctacctccatctggaccatcccttggagcatccccctaattcaccaataattcctcccagaatcatcatgattgatttcacagacctgggttgctgcctgtcctgctatgtcccagccaggtggagcagagcagtcacatccacactcagtccccaaaagctttggatccagggtcacagccaaagagacacatgcctagaactggcttgcagagcaataaggcaaagctggggtgttttaaaagggaagtccaggttggtatccatataaaggctaacagtgattgagcacctactgtgggctaagcactctgcagaacttacctcattgaataatcagtataacattttacaaatgagcaaactcctttgggaaaaactggcactgttcagactataatttgttcatataactttcacaatgttcatcttcttgataccatacttatggataaaaataatacttagtggctctttgggtaaaaatggtaatattaattgtagtgctggcagtagtaagactagcactagcaattggaatttattatgcattttaatgactgtcaggcattgtgctgaatattttgaatacattatttgagtaaaaatactgttatcactttcaatgttcccagaattatgaaaatgtatctcaaaaatttaagagtaatcactaggagaaggctgggcatggtggctcatgcctgtaatcccagcacttcgggaggccgaggtgggctgatcccctgaggtcaggagttggagaccagcctggtcaacagggcgaaaccccaactctactaaaaatacacaaaaaaaatagctgagtgtggtggtgcacgcctgtaatcccaactactcaggaggctgaggcaggagaatcgcttgaacccaggaggcagagatcgcagtgagccaagatcgcaccactgcactccagcttgggcaatagagcaagacttcctctcaaaaaaaaaaagagtaatcactaggagaacagaatatgatctacagcttatgaaccaacaaaatttaaaaaaagaagaaatatggaacaattcctttaatataagacaggaaagggggaaagaggagcaaagaaacccaaaataaaacagcagaaaaaactcacatattgtatcagtgagtatattaagtataaacgaattaaacgtacctattaaaagacagagattatcaaaccagatgaaaacattaaacaaaattcaattatttgatgattgtaagaaacatatagaaaagccttattaaaagattgacaataaaaagacaaaaaataatatgtcagaaaaactctacccacaagaaaactagtgtaacatgtaattaatatgatatgaaactaattttgttcctcaaaacaatgcaaggtagaattaaaatccctattttgcatgagactgtgaaatagagaagttaggttacttgttcaagctcacacaagcagcaggggcagaaaaaggacccacacttggatttctattactccaaagcccattcttgaaactacgtgactctattgttctaagtaacattaccttagaaactattcagtgtgtagaaagtacatgttccaaaatcaaggcttgagataggagtaaggaaaatggagaatggatcatgagtcactaaaaaaataagaaagaacaatctactggttctcagtcttggaagcacgctagatagaacacctagggaactcaaagaaaaggccagtgatttggccctaccctagaccaattaactccacatgcctaggggtgaggcccaggcatcaatattttaaaagcttccaaagtgattttaatgtgcagccagagttgagaacaacttatccattcactaactcaagggcaagtttgctaaaacatggagggtatctttaggtcattgtgacaaagagaaatgagaagatcctccaaccttatccctttgcaatggtttgaatatttgtgtccctccccaaaaatttatatgtagcaattttaacccttataagtgggattactgctctataaaagaggtcccagagagctgcctggtcccttccatcatgtgaggacacagaaggctccatgtatgaagcaggaagtgggctcttaccaaaaaccacaagcaccttgatcttggacttcccatcctccagaattgtgagaaataaatttctactgtttgcaaatcacccagtgcaaggcatttttattatatcaacccaaatggaccaagacaaaaggaagaattggcataaagagagacataagcccttcttctgcatagtgagaggatgccatgcctgagaatatgacagaatccctgtgctaacaccccctccctgtttcttaaagagaacacaatgaaccacagaatctcagcactggaaagaatcttaggggaaacttaaaatggatcccagacttggctgattgttagaacgccttggaagttttataaaaatataaatttctgtggccctcccctaagggaatctaattctatagctctgtgttgagcctaggaaattgtatttttttaaaagatacgcagggaggcttttggagaaagatggcagagtgtcccaatacataatcagacaaagcaaaacaaaaaaacaaaaaccaataagtgaaggagaaaagcaagcagcaatcaaacaaggaactggcacacactcatactatcaacatctaaaagacctggggtgagggtgggggcaggaacaggatttggcagaagttgtcaggttcctaaccccaccccatgcttcagaagtattattgctgaggccaaaatctttagacttctcactaattactatatatttgcagagaagcagactgtgagtgtgacatcatttcttcctcttttctgacttaatacggagagagttggggaaacagattgagaactattagaaaaagagctataaaacagcagcatgaacaatcaagactctctctctttctctctctctcattctctctctctttctctctctctcattctctctctctttctctcacagaaacacaggttccagggctcaacgcttaattgaggggatcatctaaatggcaaggacatcccctcctatatcccctcattagtggaatgagccctggaacagcacatttaacaaagtcatgcaagagttaaatgtggtcctacccaaaggagcacacagctctgagtctgaccaccctcatctcccatgttcccctataatgctcccaggcatcagaaagcatctcaaactggagctgacaccatggcagaggtttcaggtaagtcacaaaaggagtcctaaagaatttgccctcaatatcagagtgattagaagaagtggacagagctacccaagttaaacatatgcaagataaaaaaaatatggcacttgtgaacacacactacaggaggaaaataaggaacataatagcatattgtgctattatgatgatgaagaacctctctagaagaaaacataaccaaagaaacaaagaaaattcctgcaaatgtttaatgctatagaagaaattaacaaaaacatatattcaatgaattcagaaaagttagcaggtcaaagaaaacaaatcaaagaccaaaataatcccattttagattgtcgagtaaactagaacagaaagaatacaactggaaattgaattcctacgtaggggacatgcttgagactaaacaactcagggacttgttagatattatcagccttaacaatgtaaaaataagctataattaaaataagaaagggggtaggaggtaggaagaagcaggtgattgctaattttttcatcatttataacatgggctcaaaagtctaaaattgaaactaggtattaacagaaagcaatgactccatcttcttaaaatttttcataaccttgatgagctcttctaaaagatatccatttcaatgaagacatatttttccagaactcagaacttcctttagatgtacttgtttcctcttagaaatttaagccatgtacgttaatactctttgttaaaattgggatgtagagtgtgatcccattattctaaaattattcctgtcaatctgtgatctacatatctttccagctgtgtgtgtgtgtgtgtgtgtgtgtgtgtgtgtgtgtgtgatgatagagagattacgtgagttttcttaatgttcatgatggttatgtctaggaagtgagatttttgagtaatttttaaatttcttctctgaactttgatattttcaaaaacaattgttataattgtttaaaggaaaaaattcccaagtggttgagagggtcacagctaaacttgaagagcacggcatctagcccaggaatctgattcctgaatctccaaaaatcactcctgagaagaagccacacaccaagctgctgtcaaaatctccagtgatgatgaagcactcactatcctcatatgccccatcccactgcagggcaacttcaattttacaggaccacaaattttctttctactgctaccctatcttctagtaataatatccacctttcactgaatttccctaactgtgagctaagcgtattctttaaatcttcagagcaactctatgaaggtatgaggtttcactatagttttgcccgtcttcctgttgaagagactgaagcccagagaagtaaattttcctgaggtcccccagctagtagtttgcagagctgggcttcagcttttcattgtggttgaatacaaagcctgtgtttttaaccaaaattctttgctagaaagtattgcatcatattgaccccaaatccacttttctataacttctaaccaatggcactgactctgctccctggggacacagcaaaaagtctaatccccttccataagcattgtcttccaacataggaagacaaaaatcatgtgaccctcatctaccccatcttcttcctccccaagtgatccttctgcaggtgcaaaatgtaccgagaagagagcatattttttctgacccacgatgaagtcactgaatgattagtttaaatggaatcatgaagtttctaatatgtacttaactatatgctatcatttaagttctgctttgaaggagttcctaatagttgggttcctccggaaaatctcctaagagggtttcatcccacagacaactcccaactccctgggttaactggaggggtgcagtggtgtggataaagtaatttatgtctgacacggaaatgtattatatgcatttttcaatttatcttcctaattaaattttttcatagactcatatttaaatgagtttccactcccctaacacatgaggactgacagtgagtggagggaaaataggataaaaatgttaagtagattttccaccaagtgtgaatcctccacacacgaatcactgagggaatcgctggcactctgtgggctgggtggaggggttttctttggtttataaactccccagaacctgattttcacatgcagacatgagagcctgtccagccagcagagtatatactgtccagcatctcctgtgccaggagccacaaggcagtggggcatggaggtgccccccgggccctgcctggaacatattctcccaggactttgagcttcctggcagggtcatgttccaggagccccgatttcagggaaatattctgctcccttggtttcacacagagggtagcaagcctccaccaaaatgcacacctgtgttggcagcgaggctgtggactgtggcctggaaaacatggcctcacgcctgggaaagcatgcctcagcgtaggaacagagacccaatatagctcagctcggactgagtcaggcactgaccccactaccctgtccctaaatcccccctgcagtgtccttgatgtcacctccctgatgtcctgaaatccaagccccccagccccctggggcacaggcacggctcttcactccctccctatggccattccccagttaccatctgaactcacttattccaggcccaggcctggctgtcccttggagggaaggagagacacccaacaccacagcccagaaggaacctccacagggagtcagtcaaaagccagacactaaaattacattttctcactcccttctcatttggaggaaagtctgtgtggggctggctgtgatcacacactttcatcacacactttctgcataagtgagagaactgtctcaactgcctcctcctcttcctcctcatcctcctcctattccctctccctcctccactgaattcccagctcactgcctcccactagttcacagtgtgctagggccctccagccccaccgagaagccacaggaagctctgatccacccccacagggaaaaagggatcagaaccaccacccagcacagatataggggccttgtgtaggggaccagccagggagcccctccatcttgaagaatctaagtcacgaggacaagcacaggagcaaagcaggcagcctgagctatccatgtcccaggccactgccggcctgttctgaaaaatttcacacaaggttatccccaatattcccagacatgtgtcccttccccggtgctgcatggcccccacactggctgagtatctccagtgggagaggaaaggacagaccgactcttaggaatgcctgctcactccgtggtagcatgtccccttcaggcctcctttcccatctttgaaagtgaatcctgggtggctccctgtcaggggagcacacagataacccagccccaaagatggcggggcagacctgggcattagcaactggagttctgttttcccttctaggctacctactatgtgtcgggctctgtgcttggtgctttgtaaacccactctcattccatcacccagcaacagtgagacccaaagctcagagaagtcaaagactttgcctgaggatcttacctacaattaatggcacatggtcaagacacaaatctcattccagaaaccaagatctttctaccacaccaaatgtttccctaaagagagcccataactccacacaggaacccagcccagcctggataacccatcagaacagaggaagaaaactcctctgtcaaaatgaaagatgctaatagcaagggtgtttactaggagtgttcaaatttccattaaaaccttcctgtgcaaagatgagctacgaaaatttccttcttggaagcttgtacctcctggaatccagacatctactttcaagctgctgaaggctcccactgcctccccacagggctgcaatcccgaccatggattattaaggagtccacaggcttggctcaatgaacagaacggctccgttatatttcaacctacccactaagacttaaatatcacaccctagttcagacagccctcgcctttcatttttcttggctttaggaagacagggagggagggcatacagagccaagaacccaagtgtctgagcttttacagtaacccaaactcacccaagacaggctgcccaaccgggcccacctctgtgtggcttctccagatcaacagaaatttggggtgaaagcctgcttttctccatgcagtaaggcatctgcatgaaaggcacatgtttccaggaccttccaagctctttcttgagtaaatattctcttaaaaaggttttgaagcagaggctaaggagaggagtcaacatggaattttatttctcttggattatctgactcaagcagcacccaagactagcaagaccaaagatgggctgacccaaagataaccatttacaacaggagtcagcaaaccaacagcctaagggcccaatccagcccgatgcctatttttataaataaagttttattggcacacagccatgctcatctgttctggggtgtctgtggctgatttcatgctacaaaggcatagttgagtggctgcaacagcatggcccagaaaagcctaaaatctctattatctggccttttacaaattaaaaaaaaaaaattgccaacccttgatttagaaaaactttcagatgtagttaggcctatttcttgagcctttttaagagcaaataatatctctggaatatatttggtatagtcttatatggagggaaaaggatgaaaaaaaatggcccctgagtttccttccaaatccacaggaagccaaaaaaggaatgaggtgcctggtacaaatgcctcaggtgacagacatcctatttacagaaaggcaatctgtgcaccacctcagggaggccaaaccaacatgcctggtgcaatcatgcagccttaccctgcaaccacgcccaacacttggaagcctaacgtggacaacgcctggtgcaagagggcatgtggtcagatgttccacccccacttagctcaggggcagacagaaggcttctccaaagctgtcccttggcaggatttcatgtagcagatgccactagtctacagtctctacagcctctgactcccagcatgtacacatgtaggtgtgcacagaggcccagagaagcagggtcaatggaatccatgaagctgacctggtggcagctcagggtttattccctgcttccaacctaccagcaggcacaactcttgatagatctaacagcacactggggatggagcactgcatcaggactgaggagactcagggtcttgccccagctctgtggctaactcctgatgcaaccttagaagagtcatatcatgtctctgggactcactttcttcttctgtcaaatggattaatactacccactccatctaactcacagagctcagtcatgcaacaagtaattattgggcatctactatgagtcagacattatgctaagcacttgggatatagtggcaatcaagatggacaaattccctgccttgtggagcttacactctggggttggtatggaaactaataagggatgcatagatgaatactttgaaaaatcatgatgtgcttcacttgagtcgtggatggtgatgctatcttcccactctgggccattcatggactagactcacacactgagcagacctgctgggaacacatcactgataaaagtcattcattgggaactattctaaatgccttgtatgtattaacctcaccatcacagagagtcctcaacactgaagtaggaactctaaatatgcatactccacaaacaaggaagctgaggcctggagcactggagctaaaaaggaaatatgtgtcctgtcccttatgatatctcccatactggctggagatgttgaatttactatattaaattcttctccattatcttgaggagtaaggccaggacccttcagatggagaggaagtctctctccctagatggggaagggaagttctccttccctagttcaatcatcacagaaaaggaaagcatctaacaggaaagtagcacccagaagagaggccttaaactccttggaagaggtgatcctcctatctgcctctttgggctgaactctcctagcaggggatttttagaagggtggataaccagttgtgggctgcagtgagaagagcgaacccagcccatgaagaaggccaaaaaaatgaggactctggcagggtctgtgagctaagatgagctatgccctacagggcagttatctagctctgtcagcctccattcatttccttttttctgtctccacattttcagtaacgtcctgtctaaacatcccaccagactctcaacgcaacatagacaattagcgaaaggttagaaagtcatgcacccaagcttggcccaccacagttagaggaaaatggcaccaccttaaaactagtatgtaggtgttcgtactaaatacgtgagaaattctcccaaaggaaggtgaagctggagagagtcagggtcatccaactactttttgccctctcagagcattttcctccttgccaatgctggacaatgaaagcactagtttattcagggaaatcacagtttcctttttagaagagcaggatgctaagaagggagcaagaataagttgaaaacaaatggagtaagattcagcattgtgcacgcacccccagcccagccacccaagagattctcccaagccaggcagtgatgctcacatctggtccttcaccaccaggaccaagtcagagcaaaggagaaaagaagagaaggaagagacaggagcgcactggatgggagagtgaagggttggagaagagagggatcccagcctactcccaagcccagtgggatcatcttcccctaggaactcccatctgatattggctctggttggggctgcctctctcccagcacctgctgggtagacttccccatgtttggtcctgggaggtgctgtagcagctggagctgtcctctttctgccgctggaagcaactggaagtcccaggggccctggcgctccctctgggatttcaccctattctttcctgtctcgctttctcttttatctcctggattaacttactgttgtgccatctacccagttgtcagtgtgcctgtctcagctttgtgatctcacgtagatccacagaacctaagagctggaacgggccctgaaaacattctggagcaggcgtctcggcagactcaggcatgcctctccccagggaaccaggccgcgtctgggcagaagcaaggcttgggggagtggcaaggattgtgtgtactccctcgaagcacatcttcagaagtggagcattttcaaggtaggatgttgacataattgttaggtccatgaaggcagatgctagaagcagtgtgaaaataagactctgaggttgtccaggtggggggctatttttatacatttccccccacaacccaagcagtacatgggccctagccctcaagcttcacctcccagatgtaagactccaaccaagattttggagtcaggggcatacaaagcccactcaggggacacactcatagagtattcaactgattcagagatgtgggaagaacgctattcctatttatttttttgtagaaacagggtcttgctatgttgcccaggttgctctcaaactcctaggctcaagtgatcctcccacctcatcctcccgagtagctggaactacaggaacacgccaccacacccagctaccactatttttatattaaataaaacatgtatcatggagtgacaggaaaaacctatgcaagtttaagtaaatattgtacttaaagtgggtgactttaaattatgctcttatatgtacaggggaaggacagaggaagggctcatttaccttcattcttctctctccctagagaattctgtgtatccaattttaaaaattcatcatatgtcacagacagaggcacagaccccctgagccatggtgggaagatacttctggacaaatgtatacccagcaaaaatctcaaaagctccaactttctaatggcttcattttactgatgagaaaactcagacctatagaaagaagagcagaaacagactggatcccaaatccctgtgccccacagttgatgctctttccacctccaatctgaggcactgctctccatgtggccaggaaccgtttccaactaaactggtcctgcctagggcctggaaaaacacactgttaatatgcagccttaattaaatatttctgatgagcacaatgatgcttcaaaattctagctaggattcgactgatgctgcagcctggagccatcaaggaagagcctctttcccctaagcatggtgtgtgtggagcttgctgggaagactgagaccttccaatccaacctggccagcacatctattcaagccatcaaccagaggacagatgtagaagtcaccttctccttccagggaccactcttggaagcagatttccacaaaggggaccgtacagttctaagcttacagatggttagaacagaccagccccactggaaggccagaagtgacgaggatgaggtcaaatgtcagtgacagagaggctcagacctctctgagccatggtgggaaaaatctctctgacccatggtgggaaaaatctccctgaactaatctgcaatttccaggcatttctgaccagtaaggaaaggatttggttgcagaaggctgggaagctagattgtagaccaagagatggagaaaactcttcaaggggagagcccagccactacaaaggggcccagcatgaggtgtgctggaggtaccctgagggccgtggctgcctgactgacttatcctctactttgggaaaaggcaactcagtgcctggattaaaccattagctctggaggatgcctgtctggtttgaatcttaatttctccatttcccagctgtgtgacctcgataagattacttcatcctctgggtctgcttcctcatatgaaaacaggaacaagaagtgcataaacacatttcagggatgtagggaagactaaaagggttaatatagggcaagcacttagcacagtgcccagcatagagcagtactgtctaggctgtagctaccacacatacccagtgaaggcactcaactaccaggtggacaagcaactgatacatgtgtgtgctgctctctgctcccctttggacatttggaatttcaagtactgggacttaataccacagagggcagagttttgtttttcctgcctttgacatgatgtttatgatcttcttttcttgtgaacaccccagacctagggaccagcggtggcctggcttcctgatgcagcccatgaacacatttaagaatccaaaaaggttagccaggcgcagtggctcacgcctgtaatctcagcactttgggaggctgaggcaggccgatcacttgaggccaggagttgaagaccagcctggccaacatggtgaaaccctgtctccactaaaaatacaaaaattagccaggcatggtggtgcacacctgtagtcccagctactggggaggctggggcatgagaatcgcttgaacccaggaggtggaggttgcagtgagctgagattgcaccactgtaccccagagcaagaccctgtctcaaaaaaacaaaaaacaaaacaaaacaaaaaaacgccgggtggcggggtggggaggcggggagaaagctgcctctgcattgcaacttcccaaacagcacagacattaacattttagtgatgaaataacaaagctgatattctcagtatcattcctttattgagtgaaatcagaaatataactttttcttcttttttttcccccgtgggactccataaaactatttttgttgtaaatgttttaaaaggcagcctgtcaatatttcaaatgttcctgaattggagctcatggataaatgactcttcccccattggccaagtctcctctcctgctgcagcaaggaaaggggcacttgggagctgagaaggcaggaaccaggcgccgttgacactcctctagtgagatgaatgttccctccactgggtcagcagtgagcaccagcccaagaagtgccctcgcctccctcctgctgggcagtcaccaggcaaccctgcaggcagtgcaccaagctgttcctccataatgcacacccagtcagggcctgggcacctctagttactcagcagtgagcccacctgctatgtctcaggggcatcccacacccagaaagctgcttctacttcaagcctactcccaggggatgccccatcagggactagagggtcctgctgaacccaccccaggttcaaggtcagcagcaggctgtttcaccaggaaggccaggagctatgctcaaggtaaccaaaaggacagaaggccccacccaagtgtcatcttgcccctcctcccagcttccccattggctagtaaatgagtaaacagacatggttctaaaacctagaagagcatcagaactccctgtggatctgggttcaataacacagatttgatattccactcctggatattccagttttgtaggtcttgagcagggatcgactttttttttttttaaggttccaacagatgatactgtggctacgatgggcagctcagatgtaggccactggcaacacagagtggaaggagaagcccacagggttcctcactgggcgacacaagctcttcaaagcaagctgagtaaatctcttggtaacaagccaagccggactgcccacagctatgggcaggtctgctgtgtctttcgcctgctgaaagcccaggttgcagcacagggaacagcagagacaggatcaaaggctctctgaggacagtctgtggcaacaaagtagcagctcctctctgatgaggtaaggaagagtccaaagaaattacttttgggctgggtgtggtggctcacacctataatcccagcactttgggagaacaaggcaggcagctcacttgaggtcaggagttttaagaccagcctggccaacatggtaaaacctcctctctactaaaatacaaaaattagctgagcgtgctagtgtgcacctataatcccagctactcaggaggctaaggcaggagaatcacttgaacctgggacgcagaggttgcagtgagccgagattgcaccactgcactccagtctgggtgacaagagtaatactccatctcaaaaaaaaaaaaaaaaaaaaagaaagaaagaaaagaaaagaaagaaagagaaagagaaaacacttttgaaatttggaaatgaggaagactaaggaagagtccaaaagaaactttgcctctgcccaaggagcccacaaactttccaaggccttcctgttcctggaaacggtgccatctccaaagactcctccgcacatggaagagcctgatctctcgggcacagtcaaccattacggcccattttctcaaactaggccctcctgggggtcttagggaaagggggcaacattacacaaggcaggtgaaggggatagccaatcacagaggggtgcaggttggcattgacctcttcctaacttttctcataatatgaaagtgacttctcttctcagaagaaccgttcataatgaaattcgagctgcctcaatcttccttgatcatctcttcactcttaccacatacacacacgcacgcacaccacaggaaaacgcatcagatgaagaacttccccagtccagtgcagatttaagaaagaggacactgacatagggaggtgggctggggagctggggagggggcagacaaacaagggcatgtgactgatacacttcagggcgggagtcagacggccccctcacaggccagggtgacatgtgacaaagtcacaaggccctgtggtatttcttgaaacttgatttcagcccaagtcaaactccatggatcaagggtcatttctggctattataggatgagagtatccaggactgaagacctcatggggcagaaagaaaaaaaacagaaaggtagctcttggagaaataacctaaagattagaatcaaggaagagccaacctctcttctaacagggaaaaaaaatttactaaaatgacacttcagcatcacctattttttcaagcttgtctttctgaacagaacttgaaaacacagttgtaaaactgttttactagttcagccgacttagaaaaacaaaaagagcttctcacagctttaaacagagtcctgtgctgaagtgttccaacactccagccccactctggggttaagaatgacagatgatgcaatgtaaaaacatcattttccactggacacagagaacatggtacaatactttggaggttaaacagatgagaagggaacagtacagagacccaaacttagctcctccatgcctctagcacacacatatgcctcatggaaggcatctggagaggttagtgctagagaggccagaaatcttgtttctggttctgtgctggaattaactaggtaaaccctggatgaactgttacatctttgatcgtcactacctgagaattaacttagacaaacattgacactctataaagcagcaattgcaaaatgtgggttttcaaaagcactctgagttcttttcaaagaggatggcataagaatcgacacagctgacatatggtgtggacagagagaaatagcttgggcttggatttccggtcagttcccctttctgccagttaccatcagaggaaccatgggcaaattacccaatctctctgagcctgtgtcttcacctttaaaaatggtattatagttctcaaagtaattgcgaggaattaaaagtcaattcagggtcaggcgcggtggctcatgctgtaatcccagcactttgggaggccgaggcaggtggatcatttgagtttaggagttcgagaccagcctggccaacatggtgaaaccccatctctgctgaaaatacaaaaactagccaggcatagtagcatgtgcctgtaatcctagttactcgggaggctgaggcaggagaattgcttgagcctggtaggcagaggttgtggtaagccgagatcacaccactgcactccagcctggacaacagagtgggactatctcaaaaaaaaaaaaaaaaaaaaaaaagggaattctatgccctgtaaagtgcagtctatggaagtgatgatgatgaagaccaggatacagtacaataaggactctttatgctttcaaaaccgtgattatgctgcatctggtggaagccaggactctggaaatatggcccagacacacccagaactgaggatcaagatgagcgtggatccctgggtcatgagcatcccaaccaagtgcctgatgcccaactccagggaaccatcttccctccgcacacaatagtcattccatggtggtgcacacctgtgagtcaaaaacaccctaagaaaatgtaatccttggggcatttcctcagctccagcctccggcccatcaatcacaagcacaatcaaactgcaatgcctcaaaccaatctcctaggacccctgccagggcagagactgaaagtcactgaggcaatagagcatgtattatattgatgatcctctagctgcaagacctgattggtttgagactcccttggataatgctggcaattaattttggcaaaagagcaaaagatagatgtgacatccattgaacacagagctgcacaggagtcaggtttctggaaggtaggaagaatgcaaggaaattaactccagagtggtttgcagggaatgggggctccaggctcattatttcaatcttgaaagctgtcaatcactgtcaaaaggcagtttaatctcaccctgaagctttcaagaacactatgaatccaggcctacaattagcagtccaatgttgggctgatgagttatgggcattttccatctgggagggcacaagcttctcctatccagggcgtgccctgggcataaaggatgtgtggacaaatacaaacactccaccagccagaggtgacagaaataggcctataatatttgcccaactgggtttatgagacaagcatgtagttcaacactgtttatacagttcatgagagaatcttgggcagtgacagagaatgtaactctcatcctccttagggcttccagaaatgaacagaggatatatatatttttttaaaaagtggatcctccacattttctaaagtttttaagctctctggggcaggttaagaaattcagactgcccaggaagtgattttttttttttttttttttgcatggaatttcgttcttgtcacccaggctagagtggaatgcaatggcatgatctcagctcaatgcaacctccgcctcctgggttcaagcaattctgcctcagcctccctagtagccaggattacaggtgcccgccaccatacctggctaatttttgtatttttagtagagacagggtttcaccatgttagccaggctagtcttgaactcctgacctcaggtgatctgccggcctcgggctcccctctttacaccattctctaagcaaataagctaacatcccagaatggaattatagaaagattgcaccagtcaaaaaaggcatttggtatacatattctaagaaatgctacataataacaatatgaattaataataaattaccttctttcaccttgaactgaaggatttgcaaattttctcaagttctctttcatttgaccttcacaacaaacctgtgacatttcttaccccctatgaatggttaaggaaaagactcagaaagtgggttcttgcttcttcagatcccagatgactcctgaaatattcataattctgatcttaaaaaaaatataacacagatggtaggacatgcctcgtgaatcaggtaataccctggcagcatctcccttagagcgtagaattccacaggcagggatgtgccaaacacctctgcacgccaagctgggtgtagcaactccatcaaatccattggatcacgatgatcctggtacagggagaggggacaatggaacaaccaaggccctggaagacagcaactgaaaattttgacctgtggttcaccagcttgaatccagcactgggatgtcgggggtggggtgttccagggaaaaagaccacagcttctggatggttccaagaagataggttccctcattaaaactggtatcaaccaaccctcttgtacacagacccctgtggtgggtgtcaaggggaaagaaacagatgggcccaggatagataacacagatgcccagtccctgcccccaagaaagctgcccctgccagttgagaacactgctgcatctcatctgaagagaagcctacacagcagtcctggaattccaaatcaggtggaagaaggcagatggcgcaaaataaactcaagaaacagacaatgggaagtaagcatcaagccaggtaccttgacacagtacctctggcatggtccccaacagctggcctgttggcctccccaaacaatgcctctttctaatgagtctttctttaaagtggtcaccgactatacaccttagtgtagagctgctggtacaacttcctgtaacatagcagttgcagtgaagctccagggctacgctgggagtatgagtgactggctcagccccagaaggcaagtcactctccgtgtcctggtcagcccagcccctgtcactgggcaacatgtggttgtgttcagacatctcccacctgtccataaaaggtgaggtctaatggtggcctctttgggacaaccttagggcaatggggcatacgtccaggactgaggctgagaagcacacactggtgcatccctaccagggtgaaaatattgaaatcctttttacatggtggtaagtagcagcttccctgaattcctgcatgcctactaccaccacccagcctctacaatgggactccatgcctccccatgatccagcgactgaagggttggacctggcacagtcgacacttctctaggactctgtcggtgcccaggcagctgtgtaattgtgaaatgctttgaatatcctccccacacgggcccagtcaatggtgctgcaccttaacccaaacacctcactagtagaaaggctaaggaactcaccttcctaagaacctgttgaggccacaccaccagctgtcctccactgggcaagaaggtgtcacccccagctctcctctctagctagggatcctccattcctgctgagagggacaatcctggaaaaagaactatagcccttcaggtattgtatccatacctctgagtctatgtgtgtttttgagaggaaaaaaaaatgcttctggtttcacctttagaactaaaaatctggttgatctaatatgctagacatttcagcaatctctggcccaacacagagtagggtgccactgttctctatattcctggcccagctgaatcacagcatcatagcatttaagcaccctcaactatattcagcccgatatgtttaaaactgcaggttatggccaggcatggtggctcacacctataatcccagcactttgggaggctgaagcaggtggatcacgaggtcaggagtttaagatcagcctgaccaacatggtgaaaccctgtctctactaaaaatacaaaaaaaaaaaatcagccaggcgtggtggcgggtgcctgtaatctcagctactcaggaggctgaggcaggagaattacttgaaccctggaggtggaggctgcagtgagccaagatcgcgctactgcactccagcctgggtgacagtgcgagactctgtcaacaaaaacaaaacaaaataaaacaaaaaccctgcaggttatgacccatcagcaggtcacagaatcaactgaatcattcacaatcagcatttttcaactgaaacaacagcacagaaaacagagtactgcatattaaaagggttgctgcatggaacttttgtttaattacatacatgaacataagtattgggttgagaaagaaaaggtatttcttattctgggtttcaggggaaaaagcttttgaaagcccctgatctagctaactccactctatcattgatgaggaaactgaggctcagagaacagcatggtcaaggccactcagagaatgtgcagccaggtgaggtggttctcagtccatgcagcctgcggactttgcttttcttctaagcagctctggctctggccatgggcattgggattctgggatgctaagtagctggctcctcagttcctaagagctgtgctcaagtggtctctagtgccattgagattttccccagcagagtaacccttagcactagatctcctgaggctgaccaggaggccctgagaagagatgccagccaagcaccccatcccccattcccacagcctggtagtgggtttgggcccagcctctacatctcattctctctttataaagtctcaagcaaactgtgtggctgggactttataataaacttggagccttcttcaagctgaggctccagcaaacaactagatctttctgagcagatgcttctgctctttaggcaggcttcctgtctctacaggtggtctagccctgggactactggaaaaatgagggagtgagggtgtgctttgtgagaggctgggacaggggaacggctcctcctgacaatgtatggaaacacttttttttttcaattaaaaatagcatagatcacagatgagaaactaactagaactatataaaaatacaactttttttttttccaatgggacctgcttagatagaagctaacattccctgaaaactatttgtcaagcattgtgctatgggcttcacacacattatctccctggatggtatagtagttatctcacttgatataaaataaagttcagtgataccagtgaatgtattaatgacatacacagagctatcacttctacagtgcttattctattctaagaattttgtgtgttatttgatctcatcatcagcttgatacagttggtgctattctcatccccactttgcggattatgaattgaggtaagaaaggctacctgacatgcccacactcacatagatactaagtggtggggccagggtttgaacccagatggtccaagctttggaccctcctaattacctccactacactggttatgattccttccactttctggcgcagaagcagagactcgggaaagttaaatcatttgtgtccactccacccagaagctctccacgtacaccagagggatggaaaacatttaacaatgggtaaggcaggtccatgaccttcacaaggggcaccattggctaggctggagacctcctgctatgctggaaactgagccattttaggggctgcttcaaggggaaacccagagggtttcagagaagggataaggtaacagggacactcacagcacttagggcaatgtctattttaatcagcagggaagttttccaatatgttatcaattttggccactgcaaacagccaagataagacagtgctaaagctcttagtcgaaactgaatttttgcatgtttcggggctggaaagaactcttgagccatatagaattcaacagcctcattttaccaatgaggaaaccaaggctgctatgcaaagcatggtgcccaaggtcagagaactagtaaatgacagagtcaaaatgaaaatccagggtgcccagatgcccagattggtacttagggtgtttggtggtggtggtttgtttcttccctatctgtgctgattatattcaatacacagatgctgatgtgcatgcacggggcccagcccccagctgctgtgccacaccctgacaacctcaggatcttcagagaggctcagctgctcaaagttccaccagggaccatacaagcttcatggatattcagattttttttagtaagcacctgaattttgtgtaactgatttccacacccattgaaggcggcttctaaatttagaattaacatccaaagcggtctgttgcacaaatgtatacttcctcgcaagctgttgtcagaaacagtaaaactgacatccataaaacagtttcttcataccttaataatattgaactataaaaatagaggatctcaagcaaacaaagctgtaaccataataacctttacaaagtctactaccacagtcaagtactgtccagatctttttttaatgaaaatgtaaaggtggccccagccttattctcacatgacaatgcaattccctaggcccagcattccctctagacacttgtcactgcccaatccagaactttagtaattgatcatttggggtaataacctgcaccttatacaataaagccacctttgcagaaactgcagcttcactttcatcacttcctcctttgcctattccaattagttgcttagattcagttagacacgtctccccataccaagcacattcagttgtgccaggaggatggaagaagtctttctttcaagacatcttaacaaagtagacattgcaacgcaataaagtagtgagactcatggttgatgcttacacacaatcttccaacagaatgctttatcatcccttgcccagaacagatggggaaaaaattacgctatgccctgaaattttccattcttgatctcagcccaaaggtgacttttttatttttaaacttgagacttgagcaaaaaaaaaaaagttcaactatttttgattcatgcccaggctaaagaaacacatggtaagattctttttttttccaaacccgtaggtagctcaaacagctaagcttcaaaagctcaagctttccaactagcactaatagtgttcacagaggcagcacctctgcagtaattgcaaggccaaaaatcaatagccggggtgagaaggagctgggattccactttctggacacattgtccccagtacctctaaatacttaaaagaaccgcatagaattctcaaatgtttaagcaggatggttgggcctgaagcttttcctcccttctgggtgataaggcaacccgtcctcatcaccattttttcattacccatcctttgatgcatttcagtcctctcgagagtccaggctacccagagagaactgacaggtctcctgactgccctctgtccccagaacttgctctcttctaccccgtccctcccagccctagccccaacactgactcctctactccttctaccctccctccatcctgctattcccagtctccatagaggaaaaagggagtgtcatgcctagatgaaaagatttggggttcaagtcaccccatgtacctccctggttccaacgaacctccggaattctagccacagatccccctcttgccctctcatcctcccctaacacatccctacacattgcaggcccaggggggagtccacaaaatgggactccatgcatccatccttctgtggggccgcgtagcacacccacggcaagactccagtccctggtcccggctctgccacttatgaactgtgtgcccataagcaagtcgtctcttgctctgcagactggggcttatcacatttgtcccacctgtcccagagagctgttatgcaaagtaaggggaatcacagatgtgaacaggcttcagaatcagagctcaatataaatgtacctccttattattaggcacatggcacagtgccaggcagtgtggtatgttccttggggctaaagtccaagagatattggcaataaaagaaagtgaattataccgggcagaaaacaaggaacaaaaagagaagaacagagatgaggattcaccagcctccagagaagagtgaattcacagtgacagtgcaatcaataaaggcttcctgcaagaggaaggctttgtatgcagcctgaagtggctctcaccacgctgatcaaaggtgatttcatggccaggcatggtggctcatgcctgtaacacgagcactttgggaggccgaggcggacagatcacttgaggtcaggagttcaagaccagcctgggcaatatggtgaaaccccatctctactaaaaatacaaaaattagccaggtattttttttacaggtggcacatgcctgtaatcccaactactctggaggctgagacagaagaatcacttgaacctgggaggcaaagattgaagtgaaccaagatcacaccactgtactccagcctgggcaacagagcaagactctgtctcaaaaataaatttaaatttaaatgtaaaaaaggtgatttcatgcatgccccttcccaagaccaagcgctctttgagggcaggtgacatgtctttatgtctcagccttcgcagcttcctcctggcatctaggtgaaagaaagaatgaatggagccttgaactaaccaggaactcaactaagtggaaaagaggagagactcccagatagcagagggaagacaagctggggtcagagggcggactctttggcttaggagtagaggagttcagaagttcaggcttctgatcacaaagggaggtaaaaggagttcagaggagtcagtgacatcatgaaatcagtatttggggagcttaattgggcagctgcatgcaggatatgcagcagggggtgaaggaaagctggcagagtggccaggaggcaagggcaatgagtcaggcagacggtgagaagggaagccactgcctctcggccaaatcgccctctgggagcacccatctctgtcccagtggaagccccatcaagggccactctcagtgactgtcctctttaggctggaccttaagtgtcccctagtcctcctgccttgcacccagcactggcctcctgcaagtggttaccttccccttgtgaatccctccaggctcagggattccagggattccagggattccctcccattcccgttttagaggacaacgcggatggtaagcactcccttaaaggaagcacagtgatgcagcagcgggcggggaaacagggagagagcttttacttctgagcacattttcccaaattgctatcttttcaacacttttataaggtagtatgttaatatgacagttaagatgatgataaaaagaaggtagaggaaaaaaatgtggaagacaggaccagtgcattcaacacacagctcagacatgattgagaaacagatcctggtgctgaagagctggggacaggagcctggtgatgggcagcctcggttccagggcaggccctgccaccaacgcactgtgtgaccttaagcagctgtgctcttcccagtcactctcttccacctgtaaaatgatgtcagagatagttcccacccaagagggtagttgtaagaaggaaatgagttgatctggtgcagtgcttagtacttggcacaagataagtggttagtaactggtatctgtgatgggcaccaggctagcagttactgcctctaacatctggagacgcaaaccctagcactgcagctatcccacaggaggtgtcaaatgtgagcctcccaccccatccccctgagatccccacatgaatgcacctccccacagccctaacgctctcaccagggacacacagaacaagccagtgcctcctcgctttacagaccatcagaaatgcaaaggcagttgctgtgcctccacggaatattctctcccctaaaatcttcatgtttttctctcctcttatttctcttctattcacctactgcacaaacaagatcaggcagcagtgataggcaaggaaagatggaaatattctttaagtggaatagcaaaaataggctttggaaattaatgcctagaaatttaccctgtgggctctctggagaccaacccaaatgaaatcccattgacagaaagctgcagccctctggggaatgtccccccatcccatcccccaggatccttggtccaggaaacatggaagttggcttctgatctccctggtctcccagggatcctgctcggggcaccacctgaaaagtccctcggcagaagcacttctcgccatgcgtgaatgctgtggaaagcatctgaacatgaagtttccaattactgctggcatttctggagtgtcctgatgctggctgcagctgtcccacggaaggccagtgatgtcatcagcaagcctgacagcactgagttccaaggctggctgggaagaaaggttccctgcaggctgagcccccatcactggagagggaggaacctgccatttcccccgcaaaggtgggcactactcaggtttgctgcttcccttcctgggtagaattccattgccataacttggactcacaccaggaaaggttcagaagctgcaccaatgtccaggatgattccatctgactgcttctgaaaacttactatgtgtccagagttgttccgggtggaggcaagcccaggtgagacctactttccaaatgttcatgtactcacttcgtggcatgaaaacaaaatggtcttgcattcttcggctacagagagacaataagggaagtaaaaaagggaaagagagaaacggagaaaaagcaaaagaaggaaaaggtgggaaggaaatgaaaagaggaaaagagagagaggggaagggaaggaaggagggagaaaaggagggaagaagtttttgtcctgtggctagttttaccttgaacctccctactcaagaccttcccagttcctctctcctcctctcccttgctcagggagctcaggccctgggggagccctggcagataccgtcctctagaagagctgaccaaggagacagagcacgggatgcctgcagagcgatgtaacagattgggccctgagccctacagtagagttcaagctcaacgcaatgttcagatttcccaaggcgggggattagattaattggaatttgcaggctgtgcccaaccaagatccatatctgtcaccatgttaaccacattcaggcccctcttaaaatcagaaccccgccatccatcaccaccccggtggagaggcacggccagagcctcgcagtccaagactgaccttctggctggcagcctaccttttagccgccagcctcctccatgggcttccagataagcgtgtgtaactcttgagcaaatcctagcccctggaggaactaccggcagttatgaacacagtccctttgttcatctcaggagctgatttaattaaacgagaaactatggacccttcctaagggagaaactatttagtatccagaaccaaggaaagtaaaggctaaagggaaatccagatcctttcaaaaactatctaattgaaccttgggagcaaaaccatgcagtcaaattacacaagaggatccaaggggctgcagtgtaacccaaggtgacacagccattaagtgaaacactcaggtctgagctagggcaccctttccaatgcattatgacacatttaatctgtaaaactgtaaattattttttttaaaaaaactgtcttgggccaggtgctatggctcacacctataatcccagcactttgggaggccaaggcaagtggactgcttgagctcaggagtccaacactagcctggccaacatggtgaaaccctgtctctacaaaaagtacaaaaattagccaggtgtgctctacgcaaataaactagaaaatctagaagaaatggataaattcctcgacacatacactctcccaagactaaaccaggaagaagttgaatctctgaatagaccaataacaggagctgaaattgtggcaataatcaatagcttaccaatgaaaaagagtccaagaccagatgcattcacagccgaattctaccagaggtacaaggaggaactggtaccattccttctgaaactattccaatcaatagaaaaagagggaatcctccctaactcattttatgaggccagcatcatcctgataccaaagcctggcagagacacaacaaaaagagagaattttagaccaatatccttgatgaacattgatgcaaaaatcctcaataaaatactggcaaaccgaatccagcagcacatcaaaaagcttatccaccatgatcaagtcggcttcatccctgggatgcaaggctggttccacatatgcaaatcaataaatgtaatccagcatataaacagaaccaaagacaaaaaccacatgattatctcaatagatgcagaaaaggcctttgacaaaattcaacaacccttcatgctaaaaactctcaataaattaggtactgatgggacgtatctcaaaataataagagctatctatgacaaacccacagccaatatcatactgaatgggcaaaaactggaagcattccctttgaaaactggcacaagacagggatgccctctctcaccactcctattcaacatagtgttggaagttctggccagggcaattaggcaggagaaggaaataaagggtattcaattagaaaaagaggaagtcaaattgtccctgtttgcagatgacatgattgtatatctagaaaaccccattgtctcagcccaaaatctccttaagctgataagcaagttcagcaaagtctcaggatacaaaatcaatgtacaaaaatcacaagcattctcatacaccaacaacagacaaacagagagccaaatcatgagtgaactcccattcacaattgcttcaaagagaataaaatacctaggaatccaacttacaagggatgtgaaggacctcttcaaggagaactacaaaccactgctcaaggaaataaaagaggatacaaacaaatggaagaacattccatgctcatgggtaggaagaatcaatatcgtgaaaatggccatactgcccaaggtaatttacagattcaatgccatccccatcaagctaccaatgactttcttcacagaattggaaaaaactactttaaagttcatatggaaccaaaaaagagcccgcattgccaagtcaatcctaagccaaaagaacaaagctggaggcatcacactacctgacttcaaactatactacaaggctacagtaaccaaaacagcatggtactgttaccaaaacagagatatagatcaatggaacagaacagagccctcagaaataacgctgcatatctacaactatctgatctttgacaaacctgacaaaaacaagcaatggggaaacgattccctatttaataaatggtgctgggaaaactggctagccatatgtagaaagctgaaactggatcccttccttacaccttatacaaaaatcaattcaagatggattaaagacttaaatgttagacctaaaaccataaaaactgtagaagaaaacctaggcattaccattcaggacataggcatgggcaaggacttcatgtctaaaacaccaaaagcaatagcaacaaaagtcaaaattgacagatgggatctaattaaactcaagagcttctgcacagcaaaagaaattaccatcagagtgaacaggcaacctacaaaatgggagaaaattttcacaacctactcatctgacaaagggctaatatccagagtctacaatgaactcaaacaaatttacaagaaaaaaacaaacaaccccatcaaaaagtgggcaaaggacatgaacagacacttctcaaaagaagacatttatgcagccaaaaaacacacgaaaaaatgctcaccatcactggccatcagagaaatgcaaatcaaaaccacaatgagataccatctcacaccagttcgaatggcaatcattaaaaagtcaggaaacaacaggtgctggagaggatgtggagaaataggaacacttttacactgttggtgggactgtaaactagttcaaccattgcggaagtcagtgtggcgattcctcagggatctagaactagaaataccatttgacccagccatcccattactgggtatatacccaaaggactataaatcatgctgctataaagacacatgcacacgtatgtttattgcggcattattcacaatagcaaagacttggaaccaacccaaatgtccaacaatgatagactggattaagaaaatgtggcacatatacaccatggaatactacgcagccataaaaaatcatgagttcatgtcctttgtagggacatggatgaaattggaaatcatcattctcagtaaactatctcaagaacaaaaaaccaaacaccgcatattctcactcacaggtgggaattgaacaatgagaacacatggacacaggaaggggaacatcacactctggggactgttgtggggtagggggaggggggagggatagcattgggagatatacctaatgctagatgacgagttagtgggtgcagcgcaccagcatggcacatgtatacatatgtaactaacctgaacattgtgcacatgtaccctaaaacttaaagtataataataataaaaaaaagaaattacttttgaatgggaaaaaaaaaaattagccaggtgtggtggcacatgcctatggtaccagctactctggaagctgaggcaggaggatcactcgagcctgggaggtggaggctgcagtgagacaggattgcgccactgcactagaacctgggcaacagagccagactctgtctcaaaaaaaaaaaaatactttctttgatatatctttatgagaattgctatcttaatgttgctcataaaaataacttacacaaatgtgtgccaattgctgaagatcttcagtttcagttattctattttttatttctggaagtcctatttgtattcttcaaatctccacggattttaaaaattagtctattgtttcttcctcatttgtttcaaacatttaaaatacattacctattccattggaactatatctgaaaccctcgggaatctgattcttctgtctgttgtttctgctgactttcactcgtggtgactggtttcctcatctgttttggattttgagagtgaaagctcatgcttgaatggctgggttttacctacaggaatccatcaaggcttgagctacaagtatgtccctccagagagaatgtgcatttgattctgacaggaactctggtgtgaccaaccccaaactacctccagttaattttgcagcgtggagtctcctgggtcacccaggcagtacaaattcaaaccccaaacttgcatgaaggcagacttatgattacaaattctcacagcaaacattgttccatcctttggcaagccaaagccaaaacagataagggcccctgtcttctccctttgcccccctgcagatgtctgctggaccacctgtctgtcccctagggatatatttctcctgtaggggaaagcttcagacagaaatctcatttccaactccccacctggcaagggtcccaggtctggctccctgggtattctaaaggccatgctttcaatcctggcttaaagcctgacacgccctcaatctgatttattgtaaacacagcgaagtctttcttagagcctagatctgtgctttttcccgtacctaatttaaagctagatacacctttctttggtctttggagcccagagttcccagggccttctaaggaataagctttcaaaactttgaaatgtagatgtatttataggaaaaggaaagcagcagcaacaaggttttaatgacctataaggctaatggaagggaggaaaaaacgcacacgcctgtgtagtcagcagttccaattgaggagcatctgaaatgctgtaagaaggtagaacaaagtgggaaatattagaacagagcagagtggatggggaaagaatctacaaagactgtagagacatttctctctgtctccgtatctttctgggtcattcttcgtcacaggatgtcaacataagaggtatattttaccctatacacacatgatgtgggccaaaagttgaaaatgagtgtaggattagaaactacaattcagaattttaaaaagaaaccagaccacacacaacaacttatccaggtagtttccagaaggcttcatagccatcactcagttcgtcctcacaaaagccctcaaaagtgcattttataaccagtaatggccaaccttctgataaccagtctactgtactttctcacatctgtcactacttcttatcaaaaaaaaattcattgattaatcaataatacgtttgggaggctgatatgtctggatcacttgagcccagaagttcgaggcagcctgggcaacatggcaaaactctgtcgctccaaaaaaaaaaaaaatccatatatatatatatatatatatatatatatatataaattagctgggcatggtggcatgtgcctatagtcccagctactcaggaggctgaggcaggataatcgcttgagctcgagaggtcaaggctgcagtgagccatgatcatgccactgtgctccagcctgggcaacagagtgagatcttgtctcaaaaaaaaaaaaaaatcaataacatgcacacactgcaaatatatctccagctctatgattcctcactcaaaatcttcaaaaccagatgtgttttagaattccaattgtttcgggttttaggaaattattaaggtgaatctctgaggtttgggctgcacatcacagtcacacacactaacatttcttcaatgacacacgacaattcagactaagctggatgaatgaagaccataaactgcctcgcagttcagggcagcttccactcaccaccagcccctccatgaattaggtaaaaacactcacttttcagagtttgggggacttcaggttgggaatgagctggtgtagaactggatacataagtcatctctcaaaatatcttatatttaaatccatcagcttaaaagtccttcccactaagtctcaaaatcttcactctgattctcagaaggggcagaaaagaacagtgatcagaagaggagaggagcatgaaacagttgatggccagagagagcccagtgggcctccccgggagccatgatgtgtagtgtgtgcatgggcggtggggatgtgtaggcataaaaccacaggataggtcagacatgacccaggaagactcttaacaaagcctcaggtgtaacagcaggggcaggctgggcaggggtggccctcagtacagttgcatttggcctcagatttgtgactaagagaagcataatatgaggcaaaacctcagcatcctcctctacagcaggagagctggactacaacagcaatttcagatggcaggcctcaaccccctggttgaccaggaaatctatgtaacaggttataagcaattattttttaagaaaatggaatggaatggaatggaatggaatggaatggaatagaatagaatagaatagaatagaatagaatagaatagaatagaatagaatagaatagaatagaatagaatagaatagaataggtctgtacctcgctcaacagggacagaagcttctgtactcaggacccttccagactcaccctgtatacctgtccacctgcctgttcatttatatcctttataatactctttttttttttttttttctgagacagggtctcactctgtcacccaggctggagtgcagtgacacaatctcagctcactgcaacttccgcctcccaggctcaagtgattctcccacgtcagcctcccgagtagttaggactacatgcgtgtgccaatgccaggctaatttttgtatttttagtagagacagggtttcaccatgttggccaggctggtctcgaactcctggcctgaagcgatccacccatcttggcctccaaaagtgctgggattacaggcatgagccactgtacccagacctatcctttgtaacattctttataatgaaaagattatgtcaagctgcatctcatgtggtaaggacagccattgtttcaggaacttttctttctataagatatatatattaatatctatgcgtgtgtatatatatatatatataaaatctagcagaatgtatccacatgtatatataacacatagatataatacacatgtatatacacaatgtatgctttgcacacacaatgtgtgctttaactgtgggatgtggtctaaaaaatttaggatttactgtgctagatgactgcctctgaatctttttaacacaaacatcctgtggattgttttttctggtgttactgaatccaggcattctgtattaaaatcatcccagactgaaaatcaaaaagaagtctcgttaaattctctctttttcaggatgtactttagccactgggacctgacttctaaggtctctgccactcactcattatgaccactagggcatttatctaatctctgagcctttagttccttatttctgaaatgcagaggctgaccatcacagacctctgaagagcaactgctcacataaaattggagaaatgacgactcctagctcatagaatggtcgtgaggatcacatgaggtcatactttgaatggtgcacccaacacactgtaagtgccatataattttgcctctaagacaagactatgaatgctttccatgtctggtgcttcatgatgcttttgaatccagtattcattttgcacatgcagcctgcttggagtgggagctgatggctttcaggaggccccagggcctgaccactgcaggggctgggaccacagatcgtaccaccaccctttgttcctgcctcctcctagcccttgggaggcaaagcttgtcccctcaataaatgatgaccagaaccctgtgtttgttgcccagcctcctgggagatgggcagtggcatagcaaagggattactttgggtaaatatttctctaaacctcattcttgcctccaccagtgcccagaacgagccggccagctccccaacagccccaccgttccaatgctaggacagtgctgacagcatcagctccctgaatacagggcaaatgacctcactaaaggtaagccccagaattaagcagtggtggcagaggctgggaagcacaagaggaggagaatgcatgaactgttctctcaaggcactagcgatttccttttccagagcaggttatcgtctttacagcacttagtacttggaccaaacagccaccacattgcaattccacctgaggccatggcgggcatccaatcctgcctcctccaaaacgggaatcttggctgcacctttctggacagatggaagcccactttctggtgtgccttccagaacccagggagctaagtcttaatgctccccaaggcaccttcccatcactggcaggcaaacagaggttagtctacccaactgatagctgagaacgctgagatttagttcacaggcctaaaatgctggttcgcaatattggctgcacattaggatcacccggggagcatctgaagttcccagagtccctgccatacccagaggctattcggatttgttccaagcatttgctttatctccccaggagtttccaacgtgcaggtgctctggctcttggttatcgatctcactggtgcctcagagccactggaaggccagttaaaatagagccctgggccccacccccagaggggagtccctgacttgggggttgggcctctgaatttccatttccaacaagctcccaggtgaggctgatgctactggtccagagaggaaactagagctttgagatccagtgctcaaggcccatgtttctagccttaggcttctcagccatggattggggagaatggctcctggcttgagaagctctgttctagaatagcactcctcagtcttctgtgtgcacatccggacgcatctagattcatgcccaggaggtttgggtggaacctgtgctgctgatcctctaaccaccgtctgaggaacaaggccctagactagcaggcctgactgccaaatctacattcttcccacttcaagcaggtctagggccaggcaactcgcccttccctaacagagatctgcctccttgaaacctccactctgagagacttgctctgagccacaggacaaagaaaaagacttcctctcccagaaaggcacccaggtatcctgtccccacctctacctcttagcctctctttctccctacgaaacaatcccccatcctttaactcctcttgctatgtcacaacaaacaaaacctcagggatcttggaagcaggcggactctcggcctctcccagcacttgatggggcagtactacgtgacatttaagtcccctccactggagacgtgcttcctaagtgtccaccacatgctgcatatggtcctcagggcttgggacccagctggggcacaatgacagaaacacaggaagcacacagccgtgcaagaaagctcaccatgggattctaaaaggagtgacgctaacagctggaacaagaagactgcaaaggaagaagatccagttcccatctgcaggccaggggtctcaggactgctagccttctgccctctaagccactggtcccattctctagcctagagagctacaggatatcaagcctcgagatgctggtaacctgtccaagtcatttaacgggaggaggaaggacgacaatggcttacactgtttcccatgcaccatgtgttaggcactgtgtgaaatgctctgcaagtattatttcattcaattctcactgaaatcccatgaaatgctcattgctatggcaccacagtttaacaggaaagaatggagaagaatggagaattacagatgtgaagtagcatgccaaacaggaggtaacagcagtaactgaccccatgttgacgagcctacacactctctttttttttctttcctcggctcactgcaacctctgcctcccgggttcaagcaattctctgcctcagcctcccgagtggctgggattacaggcgcccaccaccatgcccggctaatttttttgtatttttagtagagacgggggtttcaccatcttggccaggctggtcttgaactcctgaccttgtgatccactcgcctcggcctcccaaagtgctgggattgcaggcgtgagccaccacgcccggctcacactctcttaactgccatgtagttgaagcagttaacttgccttaactgcctaaagatgaggcacttaacttgcctcatcaaggaccgggagagaccgagactcagcctccttccaagatccaggtttctatgcaagatggtcccgtcctcaggccatttcatatggtaataaataacatcaagcaatataattgcacttaatacaccaggcaactctaaactacatgtgtatacacatatatacacacatacgtaacttatgtatagataaaaacatacactcattccatcctcacaacagccttctttgtaaatatctagatttccattgtgcagatgggaaaactaaaggacaaagagcttgggtaactagggtctcccagctagttggtggtgaagccagaatttgaactctgacagtctggtttccaggttgtgctggtgacatccccctgccccctccacagttcacattggctttggtgcctaaactgaataaagagcacagttcaaggtgctttctgtgcccacattgcacccagtccagtggccaaatcctctgcaggtaccttgataaacatccagtaaggaccaaacaggtgcctcctgccctatttatagctcccagcatggccagctagctataattagcaaagctcccctaggactggagctaaattaaactggtgggattagaggccagcagcttcggacagtgcctctggacacctccagcaacacaccactggtgatactaagagaagcctcttcaaagaagtagtttggcctcaccagtgggcctttctcctgagtggtgtgtggacccaaggggttcctttaatggcctcctcccaattctagtggctgatctgtcctgagatcccccaattaaatcagaagaagatgagtgatctcatgctctaagggtcagaaaaccagaactctggtcccggctgtgccgctgatcagcccggtggccaagggactcaactgctctgggtttcagctttgcttcttgagatgaagacaggcctatctctgaagtccttcttggccggaaaatcccagacatctcacagatctcaaaaaggggcttccagttaagtcctgtggtagggatcaaatgccctctagagaagggtctgagggaagcctgcagcccccaacgagggaggaggactctgacttgaaagtctggtgtaaactcttaggctgctggtgctgtgagcctggaagaagagaagtgacaacctctcaccacctcctggagcctgaagaggacaaagaaagagatctcatcttccctctcgctccagagtatccagccgccaagggctctgcctctctcgggactcagatgtcacctcctcagaggccttcctgggttccttatctagaaaatccacctgccaccacttcctagccactggccagggcactcccaagacatggactctcatcccctatatatttgttaaaatgtgcattaactgtctgtatctcccactgggatgtgagccccacagaggcagggcctgcatctgtgctcttcacatctagagcacctggcatataccaggcactgggtctgctgactcagtgagccattttggccccaggcctcctttctctgtgctgagcgcccagctgccaacctcccggagtcgttgggcttctgtttttcctgtccaaacagggagggagccactaaaccaaacaggatgaaagggaaagaggggaggtcaggaagccttcttggagaaggggatttcttcaaggatgagtcagtgatgtctagccaaggaagcagcaaggatggagagaagagaaggggcaaagcacagaggtggaaatggcccatgcagggcatctgccggcagctgggagttgctaagagcatggaaggttatcaaagcaggagggatcagggaggcaggggtgtcagtgacaaatggccacaggtgtgtgcgaagaagcctgaattttatcctacagctcaggtgtgggcaaacttctctgtaacaagctgtcaatctgtcacaattactcaactctgccacggtaagcttgaaagcagccataaaagatacatcagtgaatgcagatggctctttcccaataaaactttatttatagatatttgaatctgaatatcttatcatgttcatatgtcgaaaatataatgtgtctattgtttttttcaaccatttaaagagatagaacccatccttagctcatggactatacaaaaagaagtggccggtagactcctgctgtgggcaatggggaagttttgggaggttttaagaaaaagaaagacaagatctgggttacgtcttcaagaggcctctctggtggccagtaaagaacggaccagtgaaggtgttattccagaggctgggagaccctcaggaggcccttgtgatggtttaggtggaagacagaagggatcccagcaaaggaaatgagtcacagaagctcccctagaaagtgatttccatctgacccattggggcagtgaggcaggtgtccccggatgtttcttccatgaacagcaattgaattgaatgccaaatttgaatttggataacagcctctcgtcctagcaaaccagattaatactaatcactttccctccccacacatatccagctaactttccataaaatgctatccttaataaatccagaaaacaaacaaaaaccttcaatgtctacaataagattatagtatatatataagaaatgtctggccgagcaccgtggctcatgcctgtaatcccagcactttgggaggccgaggcgggcagatcacgaggtctggagatcgagaccatcttggctaacatagtgaaaccccgtctccactaaaaatacaaaaaattagccgggcgtggtggcgggcgcctgtagtcccagctacttgggaggctgaggcagaagaatggtgtgaacccaggaggtggagcttgcagtgagccgagatggcgccactgcactccagcctggacaacagagggagactccatctcaaaaaaaaaaaaaaaaagaaatgtctttattttcagaaatgcaaactaaaatctctagggatgaaatcctgtgatattggtaactgactttcaacatatttcagcaaataaaaaatgaacgcatcaaaaacagctccaatctctactgccttcctcctggcccatgacttgggaaatgcagggcagggtcagcctgccccaggatcccacacacacttctaggaggtaggtgtctctggatccatgtggcctgtgcatgtgatgaggggcctcttgctcctgcagaagagccatctgtgctttgcaaaagaggtcagagtcccaagccatagcagccaagggcagagaccaaagtccagacctgttcctgaagctaaaccactgttgcaggtacctttgctctccgtgatcttttgccaatgacccaaaaagaagctgtgaatttctgaccctgcactcataaatgctggtgtccatcaagcccttaccatgtggcccaatactttatatgcattattatctttcctaaacttcacaacaagcctatgggaaatatactattttctccactttgcagatgaggaaactgaggcttagagtacaacctgtgccatcatacaggtccccacacctgggaagaatccatgcttggcttaatgctctgctatcaccatcataaaattcttcatacattttataggaaccctacattcgcattctgcacaggaccctgcaagttacatagccaatctcactcaggtctcacggctcactggtggtgacatcaggggtaatgcaggcagtaggactccagcacctgcctgccatccatgacagtgttagaaatttcatgtaagtggctatttgattccaggctgctaaaagccaaagccaggacagacaccaggctctgtttgatacccaattctcaacacttttttttttttgagacagagtctcgctctgtcacccaggcagagtgcagtggcgtgatctcggctcactgtaacctctgcctcccgggttcacggcattctcctgcctcagcctcagtagctgggactacaggtgcccgccaccacgcctgtttaattttttgtatttttagtagagatggggtttcaccgtgttagccaggatggtctcgatctcctgacctagtgatccacccacctcagcctcccaaagtgctgggattacaggcgtgagccaccacacccagccccaattctggactcttaactcaggcaggacaaacagttggtggcctgggcccacccaactgccgtgctcagttgccttactccctccactctcagcctccttgagaagcacctttcctctctcggccacttctgtttcctccacagtgaccttggaacggtgactaggagtgctgcaggtggtggccttagaaggacaggggccagcccagtcccactctccggctgtcactgaagaagcacatgctcctcaatggaggaagacagcttcaaagagcatctgagttttaggaagggtaggagacagctggaacagaggccgattctgccagctgtcatcggtctctgatctcctggcaagaaagctggccatagagtaaaacctctttttaaaaattcagcaaaccaggagacataccctcagggtgtagctctgaggttccaatatacatattttcccagggctgagaagactggaaatttctccagcaagatcaaatgcaatgcatctcaacccagacccaccagggcaaaagcagaatctgtccccgaaggtcaacgacatcatcactgacattgagtctagctcaggctctggagctggtctgcctgggcttgaatcctagctctgatgctcgctagctgattggccttggcaagttatttaacctcttcatatctttgtttcttcctctgtaaaacagaaataatgatgcctgcatcagggttattatgaggcataaacaacttaatatatgtggaagaggagcttaataattgctagtgattaaagttgatatcatcattttcaagctctgcttagggacctgaagaaatgctcattccctacctaatgcaagcggggcttaaaacctagatgacgggttgatgggtgcagcaaaccaccatggcacgtgtatacctatgtaacaaacctgcatgttctgcacctgtatcccagaacttaaagtaaaatttttaaaaaatgttcattcccccggaagtagccccaaccttgccatgccctaaatccgctgctctaaaatccctaacacaagcaagaagtattgcctcttcttgaccaactgcaaggaagtgcctgcttctccaggacacctacaagggcagctcacagagccatgcccctcgggggacttcttgaccttggtggtggaggccttggcagacgctcaggtgtttggttccatatttgcttccagataagactgtttagtagacatgcaactgcttagctatgccccaaggcatggggcaagccaccagccagggagggcccacttcctctgactcatctgcacacatgacaggccaccagccccatccgccaatagcaaggcaaagctgactcaggcaacatgagattacgagagcatctccctcccctcctacttcagtccacagcaatctgtgcctccaaccttctttgtgctacaaagataactcactggtccaggattatcatggtacctctgtgacaggctcatcagcagggctgctcttgccaatctcttactgctcagagcctggcccttgtagctctgcctgctcttccctggtcctgaaccttgcttctgctccttggactcccaggttgggcttcttcctggtcagtcttatgcaggtctgaccacaactagtcccactatgaagcccatcagaaatgaggtcaatgcatcactggcccagtttcacagaaagatggacgggggcacaaatggctgctggaatccaggtcctgacaaatagagacttgatagagcatggttgaatatttctcacatagggacacaagtccagaaggcatatggcatctctgagtactggatgtcataccaggagagtctcatctcaaaaggaggtgatgatcatgtatttggccttcaaagcccatgctgctataattttctaagatctgaaatctgagtaatacaacagcagtcagcttcatgaccaagagcccatccttgagggaaactgactcttcctcctctgatgagtgacttgactttccaggcaagtaaagcaggattgagcttactcctgggtctcagggttgcctccctggcctggggcagagcagatgaagaggaagtgggtgttgattcttagtggtttggggcttcaaccttgtcacctacctttcaggcctagcctcagtcctgactcaacaggagaggccaacacacccaactccacttcctaaaggctttggtgcccaaccccaagtcctgatcactactcaggaaggaaatacaaggaaatgccttccaggtaggaaaggaggtataaccatatgtagataaaaaaggaactttccatttctgtaaattgaagtcttattcacacaagagacagattgcagggggctggatttatggggtaagatgattaaattctgtgtcctctttcatatgtcatgctttatcacgcattactaaggatctgatttggtggcaatttgttgatttcttcagttcttagctcagttacaaaaacgcagtgagcaggacttgggtaccctgccagtcagctccttagggtcagagaaacaccgtcagtccacagtgctttataaccacccaaccaccttagacggggccttggtattcactacccactcgtcctcccctagcaacaagcaccaacaatccaacatatacgtaagacttgtgggaagcccttatttgtctttatagccacagaatgtggtacatttaagttgttccataaatgtttttgtttttgttttgagactaagtctcgctctgttgccaggctggagtgcactggcgcaatctcggctcactgcaacccctgcctcccaggttcaagcaattctcctgcctcagcctccagagtagctgggactacaggtgcatgccaccacgcccagctaatttttgtatttttagtagagacagggagggtttcaccatgttagccagggtggtctcgatctcttgacttcatgatctgcctgcctcagcctcccaaagtgctgggattacaggcataagccaccacgcctggccttgttccataaatgtttttaaagaagaacatgctccctgaaatccagcccatacgccattcagtctctgactctgtctctgacagagacactcaagagtgagctgggagaaggcctggctgtctgacatcacctaggaggctgaggtctgacccagtcttccagaccctaagaagtctcacagagaacccagcactcggctgcacttaaggcttccacagcacgctgttccagcatcacctccagctccctatgggaagcccacacacctggccaagggacactggagcatgcactccctgcacagtcctctcagccactctagccctttgctcacgttcttctctgaccccagaacaacctccctacccttctccaagctgtccctcaaaacccattgatcacttaagaatctccatagcagatcttttgtacttggcatactgaactctgaccacatgctgggcagtttgctggatgacaggagtaccaagaggacgaaaacacatgcctgctctcaggccactcagactatcgggggaggtgaacagaggaacaaatggctgcaactcctgcacagtcagactggctggggtgagtctcagccccacaacgcactagccgggtgacctgaagcaagtcgcttaacttaaaatgtctgtttcctcttctctcatatgaggacaagcatggtactgatttcaccaggccgttgtcgcagttgtatgaattaatataattaaagacaacatttattttactcaaaaattactggagtaagaggagtgaaggtaatgcacaagctatattacttggttttgtaccaagctcttatcagattgctttcactagattggtgccctgtgcacatggcaggccctcaagaaatgtttgtaacccttccttgaacatgctctgcactttacccagcttttctgttctcatcacctcttcaacattgtttgtataaaaattatgtattctgcaaggatgagatcagatgccacctcccctaattaggtttacatgcttcatgattcccagacgaacaacttccctgtcttgtttttggatttctcaggcatctaaaaacaggtcctcaccaccttcagttatacccatccatataggtatactatatgctcctatcagaccacagctccttgaagacaaatactgagattcatgcattgttatttggggccaaggctctagcgacagaacaattaaaaagcagtgctatttctgtaggggagcactccaaaactcctttccaaaacctttttctcataagcccatgagccagaatggctttccagaacctcatttttatcaaaaatagaaaccaatctgaccacgcacactttatatcagagtgaaatggaacatcccaaacttttatcaacatgcattttctgttcccggtatataataaagggtcccaatgtttatctaacatttttctgaaatcagtatgtaacactctccacttctgaatctgatggggcaccagtcagtttcatagtcatcactggagagactctgtgccagattttgtcttcagttgtaacacaggatcacatggtcactctactgagctattcccacccacactcttggttctagggatgatgaagggaaaaacaaaatggttctagcacctggatgcagaccgttgcatgttcgacgtccttttcttgtgctccatatgaaacatgtcccagatccttcacgagcaaccctccactgttcagtttcataggagcgcagaaaacaagtccagtttcaagtaggtagtaatttctgtttcatttcatgaacaaaatagagatgcagcaataaattacatgatttgagccctcattagtagacagtaaatgtcactgtttattaaaaagctaataatccattcaattttttaaattaagcaataagactctaatataataaatttgaataattaagcctaatattaatggagtgaaaacatgagggaagaaagaagttctaaaatctttatttttccctccacataaaacatgttaataatgatcccacaggtgaaagaagtttctatgtgcataccagtggagtacttatttgtcaaagcaagaactcacacgtatgcttagatggctggaaatctctagggaagtacagagaactctcctaactcagccctcactattgactcctagctctatttttacctgatctgtttttattgctggactccactctctttccattacatacagcctaagaattttctactccagctagaaagagctctgactaggacacaagtttacaaccaggatggttggtctgtacgtgctgtcttctccctgctcaataaaaggagagcatccttgtgttagaaatagcttggtatctgcggccataccaccctggacacacctgatcttgtctgatcttggcagctaagcagggtctggcccagttaatacttggatggaagaaacaactttgcacaacagttctaaacaaagcacagtttgaacttattcttcctgccacacagccttcccaccacgtgaggccgtagcatcatctctgcttggaaactctacaccaagattgcaccatcacgccctgaagaaggcaagaagccttttctcaggccactgaatataggcttatgtaaacaggcagtataactcagtaggcggagatgaaacatttgcacttctctccaagcattataatgagaaagcaaaactctttatacaagctaaacccttttctacattcttaagtgtccaaacaaacttttccccagcagcctgcacttctatggctttgcattattgggataagccaagagggagggaacaggagcctttcctcctaagctcagagagatcaaagaaaacaaagctagagagtgtgagggattctgcttggtgagcatttctcagcagagtggactttctgtgtctgggctgcgggcccctgagtgtccggtgctctgaggacaccttcagtggaatctgtggaaggtacacatcagatctgctcccagtaataatgccctgctttgcagaggctgttttgctttcccaggtgctttcatgtcttttattgatcaacaagcaaacacttactgagcgcctatcagatgcagggccccaggtggagttatctcaccgacagatcatctcacggccccagtcttcagatatatgtgccactctgaaaagaaaataaggcccagatctgccttcaagatgtttatagtttatttggagacataagcagagtcccacagaaagagaaataatactgcaaagcactctattttaagttagtcttcctcaaactttgatcataatcacaaccacattaggagcttattaaaagtcaaaggggcctggatcacatctttggagattctaattccatgggaatgaagcctgggtccctgtatttttaacaagcagccacaaagattaaaaatttaaaacctaagacagtgcctaagtggcaaatgagacagtcactcctgttggccgaggtcaaaggactccagcaaggtcagacataaaagagacctgcaagggcagacaggaggctgagagcagaaaggcagaaaggggcaaggtaggaagttaggagggagagggggatagggtcccaagaacaagtgcaatattcatgtaggggacagaatgcagaaaattctggatgtaggagaaggctgccctagaggattgagagatcaagacagacaggtaggtctggagtccagggccgtgggactgcagtctgggccctgatattttatcatatcaaagtaaggaggatcatgaatgacaggtgtttactttagcctggaggcaaagggtgcctcaggaatggcagggccatgagagcagagaattttagacagaggtcccgtgctaggcctggattgaaaccatcaggaagaccggaagctgggcccaaggttctagtaagatattttaatatcctgttctaccctcaccacagatcaacgaactcagcaagatagataatattatcttctttctgtagagagaaaactggagcacaaagtggccaaacagcaagaggaaacctggggaagccagaacagccatgtggctggcgctcatctttgacaaatcaatccactgcatttcaagcctattcaacatacatttattgagtgcctactaccagcaagaaacaagaagcagcaagataaacggagtgccgttcctgccctcagggagctcacctcccaggggaggagctggcaaacattttctgtgaagaaccggatagtgaatacttcagactgtgcaggccagttagtctctgtagcaaatgctcacctctgacatagcacaaaagtggccatgcacaatacacgaacaaatgagcatatctgtgttccaataaaactttatttacaaaacatgcagtgggccggattcgacctgtaatgtaccaatccctaatctagtgggtaaaacaaaccccttcatggctacttataaaacaagagaggtgtgttataaataaaacgactttgcagcccaaaggaaagatagagtaatttagtctggccatggatgactggggaggcagcactggagtaggacaagtacttagttttctaggtctcagttaaaacgatggggctgaatcagaagcacatggacggcccttcttgttcccgtgttctctgacttggatgtggtgctcctttcctgcccagagtcttccaactgcacaaacaacgtggcctctcccaagctccctgggcctctcctcacctctaccatcaagttttgaatgtcaattaaggaataaaaattcctaaatgatcctggaaggctgaacacacacacacacacgcacaaagtgtgtgtacatcctactgtgtccggaattggtgggttcttggtctgacttcaagaatgaagccgcagaccctcgcggtgagtgttacagctcttaaggtggcgcgtctggagtttgttccttctgatgttcggatgtgttcggagtttcttccttctggtgggttcatggtctcgctggctcaggcaggagtgaagctgcagaccttcgcggtgttacagctcataaaggcagcgtgggcccaaagagtgagcagcagcaggatttatcgcaaagagggaaagaacaaagcttccacagtgtggaaggggacccgggttgccactgctggctgcggcagcctgctttcattctcttatctggccccacccacatcttgctgattggtccattttacagagagccaagtggtctcttttgacagggtgctgattggtgcgttcacaatccctgagctagacacaaaggttctctaagtccccaccagagtagctagatacagagtgtccactggtgcattcacaaaccctgagctagacacagggtgctgattggtgtgtttacaaaccttgagctagatacagagtgccgactggtgtatttacaatctcttagctagacataaaggttttccaagtccccaccagactcaggagcccagctggcttcacccagtggatcccgcaccggggccgcaggtggagctgcctgccagtcccgcgccgtgcgcccgcactcctcagcccttgggtggtcgatgggactgggcgccgtggagcagggggcggcgctcctcggggaggctcgggcagcacaggagcccacggaggggcagggaggctcaggcatggcgggctgcaggtcctgagccctgccctgcgggaaggcagctaaggcccggtgagaaattgagcacagcagctgctggcccaagtgctaagcccgctgagcccacacccacccggaactcgcgctggcccgcaagcaccgctggcagcccctgttcccgcccgcgcctctccctccacacctccccgcaagctgagggagccggctccggccttggccaccccagaaaggggctcccacagtgcagcagcggtctgaagggctcctcaagtgccgccaaagtgggagcccaggcagaagaggcgcccagagcgagcgagggctgtgaggactgccagcacgctgtcacctctcactaccaccgccagatgctaagtctaaatttatttaaatttctaaaggttttctccctccttcccagaacctctccctcctgaaaaaggtccagctgcttctgtaccagacactctagcgagactcaaatgttcttcctgaccaaatgcccacctcaagaagaacctggagccaggaagaaaccaagggtggccacacacctcatctgccctgctgtgctggtgccaggcgagaaaacagaaatagagccacggagctcaacagcaacacctcatatggtgccagcagacagcgagcaaggcccaggcagataaacacattaaggcaggctgtgcagcgcaggccacgtccaggcctcagagggacttcatctcagccagccaaggtcaactccattctaaggcttagtcagcctcctcctctgggggctcagactcccctggccaagatcactcatgtaccaagaggattggacaaggccacgagtgaggccaggtgccagcagggcaaaggcaggcaaaaggcaccacagatcgcatgtggtggcagcaagccagctgtgtatagattcaagcctcagacccacctctgaaaatcctaccctactcaagcctgaccacctcctccaggaagccctcctggctcttgctaattagcagtaaattgtgtgttctcttaacatctagagtaatacttctcaacatagggttgcgagaccagcatcatcaataagcaccacctgggaagttgctggaactgctgttggaagttctcaggccccacccaggccaagcaacttagaaactctgagggtgggacccagcaattggtgttttaataatgtcctcctagtgattctaaagcaggctgtggtttgggagccactaatccaaagtctagattctaaaccactaactggacacctgtgttttacatgcaatccctgtgctcctggcttccctgggaatgtggttgcatttcagagcctggatcgcacatgcccatcaatcccccaccttgcccagcccaggatgccacagcaagtacttcctcagcaaacacctgtggaatttaattagcttgagttcagataccaccatcaggttacaaaatcacagaacctgaatgctgaaagaggctttagtgcccatccagcccaactgcccatcaaggctctgccaggacccagcttctccacgtttctctcaggtcaggtcagatgctccactaatgcctgggagttcagtctcattcgttcgcccagcaaatattgactgagcatgggtgcgaggcacacacagatgttcctgcacacaagtgaacgagaccaatgagaatccttgctcggagggagcagatattccagtggcaggagagacccaatcaatagcaataaataaataaaacaaaaaaaaacccatatgctttaaccattagaaaacatcagacacaccaaaatatacagaccgcctatgaaaataactaaccagcactcttcaccaatgtcaaagtcatgaaaggtaaggaaagacgagtcacaaaagcacactaaggagacatggtgggtacatgcaatgtgggaccctggactggatcctggaaaagaaaaacagcatcagtgggaaaagtgatgatatttgaggaaggcttaaagtttgacatgcagttttagaccaacatgaaacttgttcttttctatagtgatgtaagatgtgaacaattacgggaaactggctaacaggtagacaggaattctctgtactaatttgcaaattttctgtataatattttgatggcaaatccagttgggaaagatggtccaaataagaggtgaggtgcagttggcatccttaaatagagaagtgacatgtgggcaagatgacatttgggcaagacccagaggcaggaaaggggccaaccagtggcactgtgaatgacatgaggccaaactcagtcttgccaggatgtttacccgtttgtgcttgttcttctatccagatgaattctgaccacgctttgaacacttacaataatgctggaggaccctcagtcttctctttagaggaggcctcacagtcctgcagctgtgcccactgagtgtgccccggcagcctgagcccctggagtggacagtaagagagagcgcacaaaggcagtggggtccaataaagaccaaggttgagaccaggagcacctccaccttctttgttctggaattgccctggtctctttttcttgccagcaaaccactttagttcctactttctcctctctttgaccctgtgcccaagcttctcagcatgtgagcttctcctctaagcactgtccacatgcgcccagaaccttgagcagtggagctcagagcagggttgacgtgagtaagcagacatgagtcaggctgagactccacctaatgactaaggatcaacgtcccacccaaagttcccatgtctagcccttcagaaaggacagggaaccataatccaaagtaaaacagcctactccctaggaatgacagcccacagtcctgagttctagggacctcaaataagtctctcccttccaggcgccaggtcaccatctataaagcgatacatttggattagttaatcctcaagatgctttccagttctaacactgcataatcagtaatgtatcaaatgaaattgtgcaaggtaattgcagctttgaagtacaatgtggggtagtaatggtagcagtgatgagatctatgggctcctaccccaagtgaatcaccagaattggaaatggtaattgttactattaatataataatgtcttaaattgcagagtgcttttccatttacaaagcatttttatacacattatcttgtgtgatcctcataagaacccagtgaaagtggtaggaaaaatgttatttctttggcatagatgaggaaacaaagttcagtggccattcaattaggagtgacggtgctcagccctgagcgtaggactcaatgcctcatcttctttctgctgcttggtgctgtctttgctactccaacaacctgtgcaaccatctgtgattttgtctctctagtttttgaccaggttagttcaaggcatctgcacaataaggaaacccaggcattcccctggaggggaaagcatccaaattgtgcccagagctgccttggctcggtccatccattgggctcctgggagcacagtcctcgccaggaggggaggtagcagtattctccatttgtctccctgcagctcaaaatagaacagatgatgtatcacagctgatctcactgcagcatcagatgttttaaaataattaaataaagagaaatgggagtgtgaagaaaaaggccccaatttttcaacgctagtgtcccatgaaagtgaaaagaaagggacaatggtcaaagtcaaggtgagggggcagctcccccagaggtgccaggtttacagccgttctgtccctgccatccaagctttcctaccagtagcaatactgtcacccctcaccattcggttgcaatttgcaaaaggcaagagacaacttcctttcttgccacactctaggatagaagaagcactccagccagccaccaatttcccctcgctaagcagcccttttctcccatgcccactacatgcagagggtgacccaggcacacccagagtgggtgctcttgtgtcctgtcggatggggccagtcagcatgagagctctttgttcaaaccccgtctccctaccatttgtgtccctacctaagtgcctacccttgcccacgacacttatctccctagacctcagtctccacggttctgaactgggagttagaagcactcatcttacttcctcatagggttgtcagtgctatgaggatggagtgagatcacacttgagaagacacttcaaaaacttacaagtcccacagggcactaagagaccatggttcaccaagcacctggtcaggactgataacaatggcgtatggctggcctttcccagcctccctccagttagatggactggaagatcaagttctggccagcagaatgtgggcagagtatctgctctataaagccttcacacacgatcctgctccctctttttctcctctgccagctgaagacccagaggaggattctgggtacctagaaagggcagagccacagacacaccctttgattgtgttacatggctggagttgagggttgcttgctacagcagctaggccacctggactagcaaaatgtcccagtggagtagctgcctagaaaatctcacaatgaggttgtaaattcaagtgagtggaaaaaaaggttttagtggtcgggcgcagtagctcacgcccgtaatcccagcactttgggaggccaaggcgggcagatcacgtgaggtgaggagttcgagactagcctggccaatatagtgaaaccccatctctactaaaaaatccaaaaattagccgggcatggtggtgggcgcctgtattcccagctactggggagactgcggccagagaatcacttgaacctgggaagtggaggttgcagtgagccaagatcacgccactgcactccagcctgggttacagagcaagactctgtctcaaaaaaaaaaaaaaaaaaaaaaaaaggttttagtagcaaacagtcaagtttcctcataattcttccacccagtaataggataaaaatgagaccatataaaagatgtaccccggcacatggacttcggggccccatagttctgtgacgtctgtgttcaacctgtttgtggaacagtcagtacagcacacaccaaaatgcagctcccatctagattgttgctgaggtgctcttccttttctcaaacacctattaatagatttacactcctgacaataaagaagcgcggatcaacctctaactagccagacaggctagtttttgttttgttttgttttttgagatggactctcactctgttgcccaggctggagtgcagtggcgcaatctttgcctcccaggttcaagcgattcttctcctcagcctcccaagtagctgggactacaggtgcgcgccatcatgcccggctaatttttatatttttagtagagactgggtttctgacccatattggccaggctggtctcgaactcctgacctcgtgatccatccgcctcgacctcccaaagtgctgggattacaggcgtgagccactgcccccagcccagataggttagtttatccaatcacagtatcaaatgccctcctaatgtggacaggccatgctgggccacataagagactaataagccactagaaaaaaagtgggggacaaaggacatgaaagacaattcacaaacataaaacaaatggcccccaaacatgtaatgttcacccttactcatacaaaataaatcacgtctcacccattagactggcaaaaatcaaaaagggtggcaagatctcgaattgccgaagaagcagggaaaaggcactcacttgtactatctgtggacagggacactggttcctctccagagatcaatttcataatatctatcaacttgtaaatggcaagtccctttcaattcagcaattccacttctagaaatctatccaaaagaaatcctcatacatgcataaaaagactcatacacaagattattcattgtttgaagtgcaacagatgggacatggcctaaatgtccaacagtacaaatcacacaaatacatttggctactaaacagatgaaaagtctaccccaaagtttacacgatcctgctccataacatccggagattgggggttgggggaactggcaatcaagcgcatacccacagaggttgtaccaggatttacatgcgcacaagaagggatgctatggggaagcattatccttaagatgctacgggagcacaatccaatgttcgacaaggtgtgaatctgtttccatgcagttccttggtgttgtgcttattttaaacatatggaaaattagccataatgcaaataacacagcaacagctgtgttttcatcttcttggctattttgacgtcacagccatcaaatacaagctccaaaaaagagcgaatgatattgttcccagcagcacatgccaaaaggccacacaccttcccacgggatgaaggattccagggacatctctttttataggtgtgacttcccctctttgcagagtagctatttagcaactagagggcaaagccaggcaactgagacttaggaacagaattatatcagagaaattggcgacaacctttctggagcgaaatctaacagtgtctattaatattctatatagacatacaccttttgacttaggaattccgctctctcaacaccagcatgaaaggcaacatatatgagatgtagtggagaaagaaaccataccctgacaacaacctgaaagtccatcaaaagagaatgattgaaaaaattatggtacctctataccgtgaaaattctgtaattatattttaaaatgagatctatatctacaggaagatatagatctcatctctcctgcctcaggagagatgttcaggatgaaaaacgtagttatcaacaatgtattgtatatttctaatgcatatttcaaagtagctagaagagaaagaatttcagatgtccccaacacatagaaatgataaatactcaaggtgatggataccccaaattccctgacttgatcattatacattccacacatgtaacaaatatcacacataccccataaataggtaaaatattatgtatcaataaataataataaattgaaatttaaaaagaaaagcaagaggcaggggacaagaatgtaataagatcccattttcattaaacaactgaaaagccatatacaaggctcacaaggccctacccaatctgccctcctccaattccttcccctccttctgtgacttcatttcctgcctttattcctgtcacatgctctgctctgtcccattgacaggacacatttctaggtacatcctgccccagggcctttgcacttacccttggcctcagtgctccttccccagaaagccatatggctttctcccaagttccttttggtctctgtgcaaaactgaccttctcagtgaattctaccctgatccctcctttaaaattacaaaacagggaggaactttatcctgttttatttttctccatagcacttatcattggctgcattcacttctctgtaagatatttttgttttgttttgttttcatttttattgagactgagtctcactttgccacccaggctggagtgcagtggcgcgatctcggttcactgcaacctccgcctcccaggttcaagtgattctcctgcctcagcctccccagtagctggattacaggtgtgtgccaccacacctggctaatttttgtatttttagtagagacagggtttcaccatgttggccaggctggtcttgaattcatgacctcaagtgatccgcccaccttggcctcccaaagtgctgggattacaggcatgagccactgcacccggcccactgtaaaatattttaatcccctggactgtcagctccaagagggcaagggtttttccctgtcttgttccctgtggcatccccagcacctagcacacagtaaatatccagcaaatttttgctgaatgaatggaaaacctgtttgcctatcttgacccgggcctggggaaataagtggaagggtccaccctaggccctaagcacttggccaggaaagctgcaggagaggagtgcatggcatccgagagccatcaaacagtaaataagaaagactttctttttctccatattatgattccaccagttgctgtgaacatatgctatttttataacttttgaacacacattaaataaaacaaaaaagcaaagatgtaagtcagactcagaggagcagtgtggaggggaggggagacaacgcaaagagagagggacccaggccacgccaaacaaccgcctggctctctcctccctcagaagaacccatccctgccccgcatccagtgcagcaagcgtcctgggaaggtcaggctgtggctcatgaaagacactacagagtagatgctaacccaaatccgaacactcccagactctccctcccacccagctcagctggtactagaggcagacaacgaaaagctggcagaacaagacaaatggtggagaaagtaaggtctgaagaaggtggggtgggtagaaagcagcaaaaaggaatgagggttggtccagggggccaggccccagctcagcctcctagtcactgagtcagcttgggcaagggtgctctaacctctgagcctctggttcttcctccctaaaagtcaaaataaaggtatctgccttgccccagtgggctggatgtatacgatactgctttatcatgctgtacaaatatcattagaaagagaatcagcagcgtggatgcctcactggataatgcaaaaccccgccccacacggagccttggtttcctctattgtgttttccaattatttgctgttggtctatcaaaaatgcatttaatatgcattttaatatctgacctttggccacctggctcaactctgttgcttctaataatttatacattcggagtctacgatttcctccagccagatgatggctgcaccagaaaataatgatgccttcatctcttcctttccaagacttatgtctctattggttttctcttgtggtattgcgctggctctgacctagggtgcaaggttgaataagagaggtgatagtgggcgttcttgtcttctttttaacctgaagggattgcatctcatgtctatctatcaggaataaggtttgctagagatttcagtagctatctgtcttcagattaagtaagttcccactgcgcagagttgacgatgtgtgatcatgaagcacctactggatcatattgaatgtcatttcagcaattagagagatcattacatgattgttctcctttgttttaatagaggtctgcaaaacaaggggatgcctctacccaatactgcctttcagggtcaggaggaacaaggcctgggacccggaagataatgacaccactcccacctcagccgccagcctgagcccctgatggtccgtcctcctgtgtgccacccctcctctcctcaactctgtagctctctgggccaatctccttcacctccatcctgaactctcactagtccttaaaatgccacagacttgtccctgtgtgaagtcacaagagaaagctcactgccaaccatctccatgtcacaagaagtcaccctgagcatacgctgtgggaagcaggctgatcgcatcattttttcaggatgagcagttcaggattctgatgcaaagactccacatccaccttggcacatgctaagattcacatgaagctattccaaaatggaacaacatacctaggaggcagtgagctccctgctaccaaagatgagaatgtccccatgacatttgctacagaggtatttctacaaaagatgaagagtgacccagagtcatctgtaaaatgaaggtaatcagacctatcaaaaggtaatggaggaggaggaggtggcagcctagtggggagagcaggaggtgggatggactgacattccaagcacctgacatacacctcgtcacttagtcctcacagcagcccctgtggctatcaggacacagagaagttgctacaaaacacacacacagaggccgggcacagtggcttatgcctataattccagaactttgggatgccaaggcaggtggatcacctgaggtcggcagtttgagaccagcctgaccaacatggagaaaccccatctctactaaaaatacaaaattagccgggcttggtggcacatgcctgtaatcccagctactcaggaggctgaggcaggagaatcgcttgaacccaggaggagaggttgcggtgagctgaggtcacgccattgcactgcagcctgggtgacagagcgaaactccatctcaaacacacacacacacacacatgcacacacacatatgcgcacatgcacacacacacatacacagacacaccttgttcaaggtcacatagtcagtaggtgacagcgcccaggcatgcaccaagggcttctgttccagtccttaagctcactccactccaccactccccctcccaggctccagggtatgcttgtcaaactgcctaacacagtgacagccacataatgggcacttaatgattctccccagattcagatggtcagacatccctcccactgagcaaagtcaattttctcatctgcgaagcaaaagagagacttcatcttggcccttcacaggcaggaaggtctgactgcctggcttttacggtcagcccttgccacctttgcaaaatgtattcagaaacatgatctcctttgagcttcacacctctaagaggcagggtctcggcagagaaggtcactggggctcacgtggggaaggttctgcctgaggtcccatgctgaactagcacactcacatccagggacatcagccacctttactatctccaccccaaagcctcatgagtgaaaaggacggacgatctctaagatgtcatgaaaacacggagatacaattgaacctatcttcaaacccaaatgtgtgccattgactaatgtgtgatgtccactctctaaatggtgaagtgaagaagcagtcagcataagattccgccaatcaagcacaaataacaccatcgccttagactcggaccatgtgatgacctttatacccgtggattacatattgactctcctttcataatctaggcaccaaaatatctgctggcagcttattcccatcagctgcaggacaaagtagcttctgcatttggttccaagacaggagtcagcaagacactggaggccacagtccaatcccaatggtctgtttattgtctgaggtcattaccatggtgtctcctctccccgggccctggtaagcaccaaggccactttatttgtcagtgactcaaccaggaaccacatggacttcaaggcaacctcctggccctcaaggacacagagtagctaagccaaggatacagcaaattttttggaccaagagccaaagcaggtggcgcagactctgctaatgatcagatccaggcagtacagagttctgagcaagggatatagcaggagtccagctccagctcccttgatttcgagaagagccacaccacctaagaaactcaccttgctcctcatcaaaactgccctattctaaatggcactgagaatgagactgtcctttatacttttcaccatcccagttggtgggaggggtcttttgaatgtattcccacttgtgagggacacaaaactcaccaatgcctgacagcaaaatctgggggcaggcttcccaggtctcccatgtctgccctggcactgaagcctggtttgggggagacggggatgcgcttgtgataatgccaactcttcaggttctgagcactctcatgtctgtcatagaataggataggggttcactattgtagcatgacacgggctcagaaaggccacctattgtatgagcacatttagatggaatggccacaaggggcaaatccgtacagacagacagcagttcagtagcgtctgaggctggggaaggaggggtgtggggagtgactgctcatgggtatggggtttgtttcttttaggttgatgaaaatgttctggaattaaataatagcaatgattgcacaactctctgtatatactaaaaaccactgcaaatgagtaaattttatagcatgtgagtgatacctcaataaagctcggtttttaaaatttgatggtgtagaagaatatggaggtagcacactaggaggtgcttccctgccccacaagctgtctgtcatttgtcacctgggcactgggcacatatcagtcctacctagcagcccttgcaatcctaccataggagaccagcaccccacacgggcatttgttcagccctccagcagcccctcctgccagccaaccaccctcatccctcccgtggatttcggggttctgagtaaccaaagcaagcatgggaacattctcagagcatgtccaggggacacctccgggaatatgcattcatctcagaggggagctgagtgcttatttgacaagcacaatgtaaccaagccaagaatggggaagggtatgaaacaagagaggcggccctcttccttctcagggaagccggggctggcaggaagtggggctgcaagtccaacagctgacaccatcgtctatgttcctctgagctgtgtgcaaggaagagtacagtctggggctgcaggcatgacagacttcagagggaaacaaatcaggcataaaaactgctagaggttccattagcaagacagagcaaaaaataggattcccacatcccccctggtgccctcagggctccttgtaccactaaaaataaagcaacaggcaatggtgtttttaatgccagcgttcgcaggacttcctgcagagtcaggcttgcacagcttccttcggtcccccccacccatctccaccccctcagccatggatttctgcagcaccaggggccagcaaggagcccaggactgaatgagatgcgtccatggatcatgaggctgagatagatttccctctgttgtcccacttcaaggatgcagtctggagcttgcaatccaaacagggagacaggttctgtgtcccttcaggagaacagggtctgagcatttgtgtcataagcagggaaggagagggacctcagatccagtccatgattggacacacctccctctaacctctggcatcctggcaggcatctgggaggaggagttagaagaggaaacagctggggccgtaagtcaggcgagttcacacccaaccacctgccccattacacagcagaaagcacctcccttactccttccacagcccacaccccacaacccagcccccagggctgcccagtactagctcttgacagaggactctagtctctcagatcaagaacagccctcagaaaggcaatatggctctcagtgattctaagtgcagacactggcattgggctgcctgattcaaatcctgcctctgccacttgctacatgtgtggccttagacaagttacttaacctcagttcccctacctgcaacatgaggttaatgacatttcctgcctccaggactaatgtgaattgctcacaacggtgcctgacacataaaggtgtgtgataaaggccagatattactggggaccaactaacactatctttcctagggagccactggcatctgaggctggcagccttctcttgattctccaggttgccctgtgtgcagcaggatgccaacttgtcctggccccgaggaagtgaatgctaggagttgctcctctagtctaggtgacaatcaagtcagttcagtggtagggacaggattcaaaccaagctttgtctgaccctaagcccatggctttcactaccattctacactaaactatcacctgcaaaacccacagtgggcataaaaagcctcttttgtcaaggacagtgagggacatagtaacagaaactgaaagagaagaaaaaaagaagtctcaagaaaaaacaatcagcaggcatgatatttattttagtttttaaaagttgttggccaggcacagtggctcacttctataatcccagtactttgggaggctgaggcaggaggatcacttgaggccagcagttcaagaccagcctgggcaacagaatgagacctcatttctacccccaaaaaatttacttaattaaaaaaaattagctgggcatggtggtgtgcacctatgtcgcttgaactcaggaggtggaggctacagtgagctatgattgcaccactgcactccagcctgcacaacagagcaaaaccccatcccccgccccccaaaaaaaagagttgcctaattcttcatctcaggtcccttttagaaaaacttatgtcatatcccataaaccaggctatcattccttcctaaagattagtagacctaagtaggcaactagaaaaacaacacatccgtctgaggtctcaggctcacctggaaatgcaggtcctggcctccctgcctccaccctcccccaccccttccttgtcaggcagcttgggccacccaccatatgccgctgcagcccataaagactctggaacatttcaaaggccttggcccccatcaggtgtggctccaaaaaacacagggtcacctataaaaggttgagcacaaggaaacagccataaaacccgcagtcctaacagcagacacccagtggccagaacaaagcagccagctgccgggctttccaggaaccacagagggacatccctcccaaggaccgcgcccagccgcagcccaggggcacatggctgaaaggtcctcagaggccacctggtaagaagggccctgtgttgggtgcttgctagttgccagggactgtcccggatgccctccttgaagagggttaaggaggtaacacaggaaagagctggcatggtgcctgcagccctgagggcctctaaaagagatgcttcatctttcctgagcttcaaagcacccggcaagtgggacgtgattcccatcttttaggcggcaaaactgaggccctgaggagtaacacaactaggaagtgagcttcaagccaagtctgtctgttcatctcatgctttctcgtgggttcctggagaggtcagatgatgggctgtcagtgctcaaaggggcctggagacctcccagccctctgctgggtaccctccctacacagtgcagccaggcttccaaggcagcctccctcctctgctgggacagtcgtcaggggtgtttcagaaggagcaagccccgagcagcctccccacactctggcccagttgagggaggtgacagggcgccatctcctgctccctttctggaaagctttcccacatcccaggccaggccctgcaggccctcaggctggctgatacatggcaatgacaacagaaatggctcacacttggtaggtgcttcctaactgccacatcctttacacacaactgcacaaatgctctacatcagggatgcccatgttatagaaaactaggacttatggaggatgtgcaacttccccaaggtcatgcagctatcagcagccgagctggaactgaatccatggtcctcaccatgccacgctaccctgcttctgcctgaacgcaagcaggtgcagataagccgcaacacccatgactatacccacacactaccatcttcccagccgcatggcagtgctgcggcctagacccatggctcaggctctgccatccacccttggtgcagccctccagcctcccagacacccctgcatcagcctctctctaggtaacagataatactgctgaaataccaggctggctttaagttttgggtcccactgtcccactgtcctaagtcccactctgacctgtgggactaaaaggagggatgggacaatcattgctgtacaagcagctcctccagagaaatgcccagacccagagcagcaacccctcatggccctcaaaaaggcatctttggccaggcacagtggctcacacctgtaatcccagtgctttgggaggccaagaggggacgatcgcttgaggctgggagttcaagaccccatctctacaaaataattaaaaaattagctgggcacagtagtgcgcacctgtagtcctagctacttgggaggctgatgtgggaggatcacttgagctcaggagttcaaggctgcagtaagttatgaccatgccactgcactctagcctgggcaacagagtgagactatctcttaaagaaaagaaaaaaggcaccccttcctagagtccagaaagacgtctgtatctggcagtgcccgtcttcctaagtcctttctgagggtcctgagctgaggggagccaaggatgcagcttcactccatcactgggtggtctcctctgggaacttggagtattcccttcctgcagcaggaagagccaccaagagtttatcgtgttcagtccttttagtcacctaatgcccacaggcaccttgacaccatacaaagaacccctctggggaagccaacaaccccaaaacccgtgcaacccttgcaccctctgcagccagcccttggtagtggccttactgtactctccctctccatgactcagtttgcctccaataagccctggggcctcaagttcagactcacccaactagacagaccagaagtgagcctctgccctgacatcttcaggcactcttttgtcaactactcacaaggatttatcagataggaagggaaaaggacagaaagaactgtgggataaggaaggctctgaatgtcagaaaagggtctgagtaggatgatttgagactgaagaagctacgtggtatcacttaggagcaataaaggaaagattagggcaggtgaggaggataatggacagtggagcctggccagtgccagctgacggactagaccgatcttcctacctctgcttgcaaaaggcattgcttcctgcttagcatgcctcactgattcccataaaaatggcattcatctatatgctgaggtgggctgaatcatggccctagaagatgtccacgtcctcatccctggaatctgtgactgcgaccttaactggcacaagggactctacagacataatttaattaaggaccttgagatgaagagattagcctggatcatccaggtgggccctaaatgcaatcacaaaggtccttcaaagagggaggtagagggagatttgacacagaagagaaagtaagagatgtgatgatggaaactgagatggagcaatgtgctttggatacggagcagaaagccacaagactggggatgcaggtggctactggaagctgcaaaaggcaagaaaaacgacttgcccctcagagcctccagaaggaaccagccctgcagacgctttgactttaaaagcccagggaaactgatttccgacttctcgccttcagaactgtaggagtatatttgtgttatcttaaggcactatgtttgtggtcgttacagcagcaagggaaaactgacacccacactcagccactcgagaggtcccttctcctgctcaacactgctagccattaggggttaagtaattcacaaaagagacccatccctgccttcccgtaacatattgtcatcctctttcctccatcctctttcctagggtccctgtggcctggactatgctgctttctgcctaagtcctccccgtccttccagctctcattccttccatgaagctttgttccagcctcagagtcttcaaagacaccattcctctgcacgtccccctgcacccacccctggctaatgcctcttcatcctgtagatctcatttcttttttttggagacagggtctcactctgttgcccaggtaggagtgcaatgatacaatcttggttcactgcaacctccacctcccaggctcaagcaatcatcccatctcagcctcaagagtagctgggactacggggatgtgccaccacgcctggctaattttttgtatttttcgtagagatggagttttgccatgttgcccaggctggtctcaaactcctgggctcaagcgatccacccgccttgacctctgaaagtgctggggttacagtcatgagtcaccatgccgggcctgtaggtctcatttctgcagggaagccttccctgagccccggccaaggagaggatgcacccccacacacacacgcattatagtccatagtctctcatcacactccaggctgaagtgtgcatatacgtgtgtaagaggggattatctgttcaatctagtcactgatgatggaattgctcagacctctgagggcagggaccttggttgtcctgttcaccagtgaatcaactctcagcctgttatagacacttgcattgatctccctctgcccagaactgctttatttaacatctctatcaaaaagaaccgttgcatagacatttttccaaggaaggcatacaaatggcccacaggtatataaaaaggtgctcaacatcactaatcatcagggctacacaatcaaagccacgatgagttataacctcacacctgttaaaatggctataagcaaaaaaagagagagagagagagcaagtgctggtgtgggtataaagaaaagagaaccctgttacactgttggtgggactgtaaattgataaagtcattatggaaaacagtatggaggttcctcagaaaaatcaaaaatagaactaccatatgatccagcaatctcactactggttatatatccaaaggaaatgaaatcagtacgtcaaagagatgtctgcattccaatgttcacagcagcattattcacaatagccaagaaatcgaacctatctaagtgcccaccaacggatgatggataaagaaattgtggtacatgtacacagtggaacactattcagcctttaaaaaagaaggatatcctgccatttccaacaacatggatgaacctagaggacagtatgttaagtgaaataagccagggataggaagacaaatactacgtgatctaatttatatgtggactcttaaaaagttgagctcataggagcagaaagcagaacagtggttaccaggggctgggatgggagaggaatgctggtcaaagagtacaaactttcagttaaacaggaggaataaattcaagacatctattactgtacatcatggtgataacaattaataacaatgtattgtattcttgaaaactgctaagaaaagagattttcagtgttctcaccacaaaaaataggtatatgagataatgcatacgataattagctcaattcagccattccacaatgtatacatatttcaaaacaacatgttgtatacaataaacaagtacaatttttatttatccagagaaaattttaataataagtgttcattttaaaaaaaaaaatacagccaattggcactctcaggcctgcgtcaggaacaagaggaagtcagggctcaagtttcaaaaacacagactgaaaataaagccccaaacatactcaaggatggaactccccacagcctgtcagcagtggacaaaaccttccatagcagaagctgcaagtaaaagatgtctgtgtgggaggaaccatttagaaaaagcagtaacaaggcgatgaaaacagaaacaaggcggccagtcacccaccatccccaattcgcccaaaggccaggtcaccctgttcccaccctgcaccagctgctcctctgcctgcggctttctggcccaaatcctgtgtggccctcactttctcctcagtcctgcctctgccatatgaccatctcctcctcaaaagaggcttctctggctacccaccaaagcagcccctctaacacacacaatcccatcccctgttcagtggtctcatggtgccactgtaaattatctcattcattgatttactgaagtgttgattatctgcaccccccaccacacacactgaaacccaacccagccctttctgttgcagtttcccagggcttcagacagtccttggcacatagagggtgccggagaatccagaatgaccctcactgtgcatatccatagctgccctcactgagccgcagcctcgggctgccccaaaaggtaagcggagtacaagggtggaggctctctctctctctagcacagaatctctttcttccagagtcggccagcggtgctgtctcttttctgctgggaaagataggaatggagattccttgaggtcagacacagtagatcctagtcagaaactcccattggctaagtgagagaagccagacacaaaaggccacatattgtgtgattccacttatatgaagtgtccagatcaggcacatccagagagcccacacagagtagaccagccagggactgggagcagagggaatagggagtgactgcttaatggtacaggacttccttttggagtgatgaaaatgtagataataatgatggttacacaactttgcgaataagctaaaaaactaccgaactgtatgtacactttaaaagaaggaattttatctcaattaaaaaaacaaaaaagcacttattgaaaaatgccatggagtggttagcagagcaaagctctggagtccaactgtccaggctcaattcctggcttaagccatgagctatgtgaactgagccaaattacttggcctctctgtgcctctgcttccttgtctgtaaatgggggtgataatcatgccaatttcacagggatgctatgaggattaaatgcaaccacccatgtgtaggggactttggctaactcctttccaaacttccaccttccccattccttgcagaccttgttttccatttgagatccataaggttctgaggatactgacaataatccctggcttcagccagttcagttacagcaactctcagaacctgtgctaggaatgctggtgcaaaggtgatttatttcctgacaaggttgagcagatcagcatgtgccctccagagctgcagcagccatgtgtgaacccagaggcaaaccagcctcaggacaaggccaactgtaaggagagcagattagagtgacagaaagaaactgggtccatggagacatcgttgagccaccggatcaaggctcatctgaagtcatccacctttccaactatatgagtcaatggagtccctttaatgttaagcccattgaagtgagcatttctgctacatgcaatcaaaagcttatcactgattcagctacgtaaagtccctcatacccagcccggcacatagcgagttctccattaagtgtgacttattatcatttttttttccaagcttctctgctgttccccaaggccagtgttcacccagatgtctagatacagaaactgttctactggtttatctagatccaatcctatgtccctgtaatggcaagccacagacaactttaccaaaaacccttgctgtgtgcaaaatcagtgcacacagcaagcattcatggggcgaggtactgtgtgctcagacaagactaggtacgcaggggacagcacatcagggaaggacaaggcactctgatcataagtccaaagaggagttcataatctaatcagcaaggcaagatcaaggtccacaaaacagtaaagtatatatttgactagtgacatgatttaagaaatgcaacagtgcaagctaaaggagtccagagaagaaagagatgggaatcctggtggcattctggtttctcctggctcccaatgctcccaacacatggacctaaccagatccaaaaacatcctcccaagaacatatggaggccacaggacatcagagcccagcaccagaccttgctcctgcaaatcccaaagataatgtgcacatttcacggacatggccaaagacccaggcacattctaggtcatggtcacgaaactggctgaactagtcaagaagtcctatcatcttttcttctcccaatttattttctttttccctctttttctcccaatgcagtaaaaatgtgatgcatgaaacaattattcttcagaactcaggggcaggtggggagcctcaaatctggagaaagcaaaatgtaaatgatgcaaaaagagatcaagatccatgaatattcatcttcctctcccttctggtggaaactagatttggaggggttcattgcgctccatttcctctgaattcctaggagcgcttgtggtcggcatctcctcattctgcctgaagaccacatgcaactcatagggctcttgcctccaagaacaggcggctgcacaggcgcatacattgtaccaacctgtacaccttatgtctgtgcatgccctacatgtatgttagacttcaattttaaaaaatgaaagtcaaaagactggtcaattccttctggtcctcaaggcatatttccaatgtgggggtaccttcctctcttcacttcacggtggaggatgattctctactctacctcctcacctccctgacacacctccttgccccaaaacaaaacagtgaaaatgaacaatcccctctaagccatttgcttatggaagacaaagctggagctgactcctttctggattctctctccctactccccccacccccactgagcacaggcatgcaatagatgctcaataactgtttattttgggaataaattacaaatggtatggaactatctcacacacaataagtctgtaagttcctggatgtctgagcttgtcttctacctcttgggatgcctgtgtggccctccccaaaaccccaccaccaggtgatttcttaacctctatgagtctcagctcctgaaccacacttgtccttcaggatcactgtgagaattttaccagctaagatgtaaagtggccagctcagaatgtgatatattgtaagccctcaataaatagtagctccctggacccaaccttcccccacaaccttccccagttgcagcacagagtttaaaacctcccaggagccccataaactgtggccgaccaggactgaccagcttcagctctgggtgctctgtgcctctctccaatacacacagtgcttcattaaagaactcaaagcttatctggcccaaaagcaatgcttttatctaaaatcagaccacatgggcaacaagtgaagcaggaagcctatcaaggcatttgggccaactggttttggctgccaagggagccctccttataggaggcggttcagaccgcaggccggctcacatacaacactggtgtacacggaggggttaattagcagtaaacagatgccatgattcacctctgtgctgttatttccccgtgtgcagctaaaactataatcactctgttctccgacaggatgtttgcgttcaagccaaaactgcctcctctatccaacttgctgcagttcggttcagcacagggcaatgaggaacttggctcctctcacgatagctggtggctggcctgacagaggccccttcagacagggaaggaaagaggagatggatggggtagagaagaaaaaaatgaatttgtcattttatcaaacacaggtgaaggctgtctgctggtgggaactgctcctcaacacttaacacccacagagctcacaaaataccctttcttctgaggcagtcaggcatgagaggcttcaggagccctgtgacaagtcattggcaagaaggagctggggcaaatttgcaggccaatgcctgggtcacaccctccctaccactgcccaggcctgggtgggtgtctagtctacttggagcctgggacctggtaaaggtggcctgaaaggctcaacctcagcttccagaaaaaattaaataccctgagagagccagaaaacaaagagattcagtgcccaaaatataaatgtaaccagtgtggagtattagtcaattcatcagcaagaggttactgaatgctcgtttgttcattcattcgcccaccatctaccaaatgcccaccagagacatgccacgtgtttggtgctgggaatacagaaagaaatgaagaagatgtatgtcctgtctcagtggcccacagaccagagtgtgccaaatcctgaaggatccagttaggagcttacaatctagctggaaagctaaagaagggaagcatgcggaattctccggggctcatcgccatccctcacctaaccagtgctttgtgtaagatagactcaaaggtgagcttgaataaactgacttctgctaaatgccattattctacctggatacatcacaaaaatgggagccattacctactgagtatttttcatgtgctaggtggaactttctctgtggtcttcaccctacatgtaatggaaactgaggcatgaggagggtagacaacttgcccaagaccacacaggggaggcaagagaggaacccaggtccttgcaccccaaccccatgccctttccacctcactgcatgagcagaggaaggagcccccttgtccatccctcacccagccccagctcagcttgggctcccccaagcaagcaccacatgactgacactcttggaatcctcttcataacctggcccaggtatgggacaagttgccaatgagcaacatatttgcttaaccaaatgcctgtggcagaataagcttgagataaaagggagtgtgaagtggaaagaagacccggaagtcttcatgaaggaacttggtgtacagaaagatgttttgggtgcctcagaacacataatccctgatagagaaaagagtctggagacaaataccagatgttaagcaaccttaacacaggcgcctgggctgcctcagcctatcagagtagcacaggttcctaaataggggaaagtgccaactaaaaagcccaccaggcaggagggctgggtctggagcctggcctttcttctttgttcagagcccaaaaggtgcctctggtccattcaccattcaccaggccccagagcagccccaggatcaccagatgggtccaccaggtccgtcctgctctggctaccaggcttctaagcctcttttcagaccctcagccttctgggagaaaccattccatgccctccagcactttccaccccttctgttccttttgacatcatctccaactgcctgaggctgcagaaggtgggtggtgtaggggcagaacaggcaggagcacaatcacaattcttataaaaatgcaagggactgctggagccaccagggaccctcagaatggcctcatccaatcctccgttttacaggtggcaaactgaggcctcgcccctgagttaaccctttcaatgcctgacatctcgtactgcaaaattcttcctttcctctctctccattcccctctccctcgtccttcctatagtggtataggggtgtgccgtgggtgatgagaggcagagggaagggagcatttctcaccccattttcctccaaccctactttctgcctccatctttagcactacctcactgtccgtcttggtgctcactgttggcccctggctaccctgccccttccagtggtctcctgtccctcagttcagcacaatcctggttatattgacaaaggagagggatctaaaataaaggccaacttcatcataacagggccatttattgaggacttacaagatgctaaatgctattatactcacaaaacctttacgtggctggtatttttagtattcacagtttaccaatgaagaaagtgagctttgcaaggttaagtaaattggccacaaccaccaagctaatgcaaggtagagccaggactcaaacccgcctttgaccaattccaaactaggctaagagcctcacaagactgaatttaagagaccaaaatgaacattcaaaatgttgcactgtggatgcaaagatggaaggcacagagtcctaggcttcagagatgctacattccagcagggggtggacattccacagacgtgcaatccaacctggatggactagagtggagacttaccagaaacagagtgaccaatgacctaggaggttattgtcaatgcccacattaggggaaaatgtcacagtctcccaaagatgaccaaatgaaagtaacagtaataactaacactttcctagcccttggtttgtagcaagtgctaccctcagcatttaacacatgatcctcccaacaaccccaggcagcaggaggataatgtggggtgacatctcccagcatttgaaagtcaatttgaagaccgggtgcagtggcacatgcctgtaatcccagcactttgggaggctgaggcgggtggatcacttgagatcaggagttcgagaccagcctggccaacatggtgaaaccccgtctctactaaaaatacagaaattagccggacatggtggtgcgcacctgtaatcccagctactcgggaggctgaggcaagagaatcacttgaacctgataggtggaggttgcagtgagccgagactgcaccactgcactccagtctgggcacgagagtgaagctccatctcaaaaaaaaaaaaaagccaatttgatactaggaactgtttgagggcgttttcagtattattttattcccactttccaagtgagtgaactgaggcatgcagaggtgaagtggcttgcccaagatccaaaggtcagcaagcaacacaactatgatttaagcctgagtaggctggctccagagggcatgtccctgatgaccacactgaactatctagaatgagagacgttgctcattgagacattacaattctggtccattggattttagaaaggcaaccgtattacttatgttactactcacgtttgagaccctgttttctcagcagtgaactgttgaacttactttgctgagacataaaattggacatgggtagaaggggctacagtgaagtgcatttccaaggtgaagcacatcaccacaggagtgagacaagaaacccgggaagcagcctctgtcatccatgagccttccactctcaatgctccaggcaaagagccacgccaggtaagattcaaagtgggagagggcagactgggagatgatgcattcaaatcatgagggcaggctcaggtaactactgtcaattcaccacccctgaattagggccaacgtaaaccagtgacaatctctttgaaacatgaagcagggaggcagttatgccccttagtccctttatcctgaaggtgtttaagaagctgagtagctttcaagctgcagacagggataagaagaggcagagctgaaggcactccagagcagcataggaagagggtaagagttaacaatctgaagacagaaaaccctgggttctaatgctggtactgccacttattaaggatgcctcttgggcaagtgacatcacatagccattgcaagccccagtttttgtacatctgtaaaatgggaaaaatacagatagtatctacatcataggctgatttagaggattgagataatgcatataaagtgcttgacaccatgtctgacacctagcaaatacccagtaaacattcagttttctcattgggtcatgataatggttctggcagagccagctatggacagcagaagccctcagtgtgggactcgggagccccttcagcagtccaggtgttctccaaatctatttcaatctcctgggtgcagtgctacatttcccaggatcccttgcagttaaaataccatgtgatcaagttctggccaatgaactgtgtgggtagacgtgatgtgaatgacttccataactacccctacaaaactacccctcatgatccttacttctcatcccctatcatccggacagatgcagagggtccagcagagaccttcaggggcccctagaagatttcaggtccacaagtgaaaggagccggggtctttaatgactgtctgaagtgtgtcttcactgcaccctccacacacaccatcaatggtactttgtatgagcaatacgtaaacttctgctgtattaagtcattgacatgttgacctcttgttacagaggtggcctagctgactaatacacagtttatcaaacctcaagatggactcacaggtccctgttgcctcaatgattccatcgccactgcacacaccagagtctagataccataaatatggtccaggagagaaaccagcagcgtggtgtggtaactggcaactggccaggtatggtaagcataaggtaaagcctgcagcaactcaagaaatgcagagggaagactactcgtctagaagaaacaggatggcccagcagcaatattacctgtgctcatagctactggttcttcaggagaacaggaaagagcatggtctcaaaggccaagcatatcagaggccatatctgcctgggatctacccagaaaagtgactgaactgctctgggcttcagtttccacaactgccaatcatggataacaataccctatgttctgtgacatcacactggtatcttcaaaccagccagggcaggaatatttataccataggaattgacgaacaccgtacatagggactttcttctctagaaatcccgttgttaatcacttaccagcacatccctggataaacaggagtcagctaagtggaaggggagaaggaggacaagaaaagagaagtccggcagtgtgaacagcatgtgtgaaggcccagaggtaaaaatcaaaaggtttaacgaaatgaaggaagtcctaagtggctgggtgtggagagcttgggaagatgttaagaggaacctagaaagagggcaggagctggaccttgtgaaaggacttcactaaatagtaattatttgttccagtcatccatggctatgtaacaaattaccccaaaatgtagtggcttaaaacaatcatttcattttgtttatgacttttaagtaaggaattcatagagggatcagctggtgggttcatctccaatctatgtcaactggggttggaggatccacttccatgatggcatcttcacacatatgcgtggtgccccagtagtgtctctctgtctgtctgtctctctctctctctctctctctctctctctcgtatgcccacgcacatgcttcctctcactctcgctcttccccctgtagtggccaacttccctaagaagtagcattcccagataacaaatgaactgccagggttcttccaacatagcctcagaagtcacatagcatcatttccaccacaatccatgggttacaagcaacccatggattacaggggctagctctgccccaaagggtacaacccaagaggatgaacgtgaggagtcgtggttcactgagggcctgctttgatgaccagccaccacattgagcgacccctggtcactgccctctaggaccacctgccaggcacagatccagaaagaaaccaggaccagccctgtccacaaggagctgtctgcagaggagacaggatgcctgtatagaaaatagggctgcagcatcagacggctgctccccacccaggatggaaggacaaacagagaggacgcatcagggaagggagaggcagagaaagctgactagggtaggtagagaaggcttcccaggaaggcggcattcccagcaagatgagctaagacttggaggatggaggaggtggagggttggaagggaaggagtaggccatcactggggccacccccagccttctatcacatttggatcactatggaccacgccaggtcatctccgcttttcccagcagggatgttgatcagacctgggcactctgcagtgatgatcagcagctcaagagcaagggtggctcctgaccgtgaggggtcagcaccaggcccacaagcctgtctgttgcaccagtgcccaggaggggctgtcgactgcagaactgttttctctggctcgacctcacccagaaccagcggcagaaaggccagttatgcaaccatcctcaccacagcctgccagcctcagaggctgggcctggccgccgggcctggccgccaggcctggtaaggagactgctgtggcctgcacagcacaaggccatcctgggccccaactgccactttccatgcaggtgcaagacgctctgctgacaaatacctggggaaagcaggagctgtgggagggaggtaaaaatagcacagttggcaacagagaaggcttttctaagtcctcagggtcctattagtccttgtccatgggatacacatgagctggcactgagcattctctcttctccaaggctcatgcttagaacaggcacagaggcctgggaggcctcttgtatcatgtcaggagctgcacagtgatcagaagttagggagagcgcctgttgcagaggctggatttggaggatatgctggggctgccgtcataaccccacatccccagtgggttctctctggccactccctctacggccagttctgttttctccccatttttggaaacccaaattcttgatgtttctgttattcacattgccattaagaattatgggctttgcactgtgtttttaatttgttgtgtaagggttttacacaaacacagctagatgcctagaaaagacaatgtatatgggcatgcaggctgtgcactgcacaactccagagggcttcattcatgaccaggatgtgagtggcgccctggaatcatgcaatgtggttaccggtattgccagagaggaaatgatgtcttacatgaccccatatccccgggaaaaggccagccatgctaataaagatttgctaactaaccaatttgtctcctgcttccaaatattccatgcacggggtttggcaggcacacggccacaatgcgcaatggcctagaaagagagccatattgaaatataataatgtatttccaggccacggaggtggagaggcacaaggaattgatctttctaaggcaaggaagattcataaccactgaatgagttaaccactaccttcttctgagtgtgcagattaaattctctgtcgcaccaacatccaagtgcgctaaattttaacagacctggaatttggatatatttatttctctttcacagaattcccattcttttactaacacagtttcagagtttgagatatgagcatatctcatgtgggataataaggcatcattccacaccaggttgcacaggcccatggtttaatgatgagacttcgctggtgggtgcaaactttgctggtcccccatgctctcttgaatctgtgtgcatctcacacatacgtacatgtacacacacacacacacacacacacccctctctcaagtttttaaaaacctacttaaattctgcatcctacctccaatatactctgtgtacagtgtaagtgttaataccaaaaatagtgtttttctgctgggcacagtggctcacgcctgtaattccagcactttgggggccgaggcaggtggaccacttgagctcaagagttagagaccagcctgggcaacatggcgaaactccatctccaccaaaaatacaaaaaattagccaggcatgatggtgcatgcctgtagtcacatgcctgcaagtcccagctactcaggaggctgaggtgggagattgcttgagcccaggaggtggaggttttagagaaaaatagtgtttttctccaaaacttcatggaagactgttgacactcagaaaaatgacccaatattgattctgtgcctccacataccccccagcacagagatgtggcacatgtgctgtggttcataaaatacatttatatgtcatctgatgtgaatctcatagcagtcctggagttgtacattgagtaacctgcatgactgtatatagcccactgcctgtcaggtagagaaaaggtgattatcccattttccagcaagaaaaactaagactcagggaatgtaatagaactagacaacatttaaggttccttctcatcctgggaattgacatacctgagaattcagtagtacaaaactctctgaacttgtcaagggacctcacatctctccaggaacaacacaccactcctcttttcagtcctgtctatgtcatcagagtttccctcacactgtggccaggaagagctaaggaggtataaatgaggtgtacagtgtgggattaggtgcatgggatccacagcccacctgcctggatttaaactggctctgctcctcacctgtgtgtgaccctgagcagttactcaacctctctgtgcctcagttttctaatccataagtgaggataataataccaccgaattcactgggttgttgtgaggattatataatacatatagtttaaaaacaaccagacacacagtaatcactcaaagtttgttatccaaaaaaagaaaaacattctcattctctatgcatccattttctaacctgtaaaatgggaatttaaaaggggactacatcacaggattgttttgaggattaaataacagaataaacataaggagcttaaaacaatgcttaatgcatagaagccactcaaacaagtttgttctgattttttttcccctaagaaaatagtaactccaattcccacagaaagacttcccaaaacaaaagtaccaataagtctgaaaataaatgcaagacctgaggaggaatcattgctgttttctaaaaccagtgatagacaggctatcttagagaccggaggttcttgctttacattcattttctgaggtcaggaagtaaaaaggaacatgggtgaacaggcactggtgagatgaggaagaaagaacaggaacatctcagttgctagtttctgttttcaccatgaaaatcattttaaagccctgcctagaatttaaatagcatcatccctggagatagctgttttagtttcattacagtctgtgttcgtagagtacaaatagaaaccttcgtgattttattagtttccatgcaacttaggagagatttgcatgataacatttcatctcctgactttaaaaagggaccaattaaaaatacagcacttgcattgcctgtcacgggaaaatgaaaaggttcacagagttttaaaaacctctgccatatctagtccatggtcataaatcaagtattcagtactacggtggcaatcactattgtctaaatttttagtttattttgtaagaagtacttggaacagctgggtgcagtggctcacacctgtaatcccagcactctgggaggccgaggcaggtggagtacttgagatcaggagttcaagaccagcctggccaacacggtaaaaccccatctctactaaaaatacaaaaaaaaaaaattagctgttcatgatggtgcatgtctgtaatcccagttacgtgggaggctgaggcaggagaattgcttgaacccaggagacaaaggttgaggtgagccgagatcgtgacactgcaccctagcctggacgacagaccaagactccgtctcaaaaaaaaaaaaagaaagaaagaatatttgcaggatgtttgcacccctgaaaagagttaaactatagtacagaagaaacaaaatgtacaagtaagtatttttgcctggattgcagcaagtcctacacaattaccaacaccccaaagctacctggtactctgtggatttgtgaagtgttaatgtaatgtatctgtgacaagttaaaatttaatgcatggctccggtagcataatcgaatcgatgttatgtaacctaagagaactattccagtaagttctgatgtgctggctgcttacggttcagggggagtttttttcggaggttactgagtatttaggaatcatcccttcagacacttgctcttttgccacagaagctgcagttatcttatccctgctttcggcagctggaatgctccgtggaacagggctgagatgaacgttctatctccaaggctgcgttttggggcaagttaaggaaaaggatcaaagtaagttgatttgcatgaccttctctttaatcagatgtttctttttatgttcaacctcaacaaagccagcctatcatagcacactatttatagtctataatctaagatgttctgaaccattcccccacaccaaaaattaaaattaaaacctcaatagtggtgtggctatatcattagaagtaatagtagagtcacaaaaacctatttctgagactttttttttaaatgacaggtttgatggtatttccaatggggcctgtgtccctagattgtaattcttaaatatgtcatcaaagtcaatattgaagttctggggacaagtcaatcaaatttcactcttgtgttttatagtagaacaagaacttctccctggattcactgccctcaataacttaatctttggttctttatcaggtaaaaatgatagttttaaaatctgacttaagaaatggctttatattgaaatcatgaaatcagagaatttgttatatgcatgagaaaactaaggcctggagcctatgacttgtctaagacactgtagctagtcacttgtcatatgtcaaaatcaaaaatccggcgctcccttaacttcactctaagagtagacaccattaaaccagaccccacaggcagaaagagggttgttctcttcatttgtctgctctcaatgtgggcagggcctacatcaaagtcagcctgggtgcttctagaggggctgcaatctttagaggaagaatatcagctgcccaccgagaaaacaagaacgccaccgtaaagaacatgtcagggaaggaaatgtgcccaaagataatgctggtcatctcctggagggggaatttggaggaatgtttttcccttttctcaaatgtttatttataattgtggtgaaatacacagaagacaaaaatgtaccatcttaggctgggcacagtggctcacgcctgtaatcccagcactttgggaggctgaggcgggcggatcacgagatcaggagatccagaccatggtgaaaccccgtctctactaaaaatacaaaaagttagctgggcgtggtggtgggcgcctgtagtcccagctactccggaggctgaggcaggagaatggcttgaacctgggaggcggagcttgcagtgagccgagatcatgccactgcactccagcctgggcgacagagcgagactctgccaaaaaaaaaagtaccatctcaaccatttttaagtgtgtagtacttcacacttaaaaatgtgcatgtttcacattgttgtgcatcccatctccagaactttttcatcttacaaaactgaaaccctatacccattaaacacttccctccctctggccctggaaactacccttctactttctgtttctatgagtttggcaactctatgtacctcatgtaagtggaagttatccttttgtgactggcttatttcatttggctgatgtcctcgatgttcatctatgtggtagcacgtgtcagacttgccttcctttttaaagttgaataatactctgttgtatgtacctaccacaattcgctaatctattcatctgtgaatgaacccttgaattgcttccacctttggccattgtaaataatgctgctgtgaacatgggtgtacaaatatctccttaagaccctgcttttaagttttttggatatctaaccagaagtggaattgctggattatatgataattgaatgattaatttgttttgagaaactgccatactgctttccaccgcatctgtaccactttgcattcccacaaacactgcacaagggttccaatttctccacatcctcaccaacactggtgattttctatttttttttttttacagtagccatcctaacagatgtgactgtgtcctttttgtttaatgcccctgcacggcctacgttttctacaatgaacatgtagtatatttgggattaaggacaaaatataaaatactgaagttaaaaagtaaatcctatggagaaaacagggttgtgaaagaacttaagaaatgattgggttttttttttttagactgaggcaaactgttgagccctcttgtgggctcagctagagacatcattcctatactcttcaagaatctaccacctgatcggctgtggctgccacaagccacaggagaaacggccataattcatgggcagctgaaataattcctctaagctctgggaggaaagtgttcccagatgcaggaaggagaacaacaatgtatattaagctgttgccagctaatgttggtcataaaaatccctagcacttgggtaaggcctttcatcttccaaatctttcctccaagccttagaacacttatctctgagttctccatttgaataactggaggcccatttttccccttccagagccacaaagggtccactttccaaaaccacataaagagaaaacaacgtcaatgtggcaacttctcccaaagaggagcagaattctgctcttggttaacaagcacacaaagaacatctcccacaaacccttccaacgcttcacctctgagccacacaggccgcgtgctatcagttcattccacagaatgtctcgtttgaagagctaaaattttccaaacgtgaactcattctacccactggtagaatgctttactccttggaggtgaagtcatttgacatgatttattcattaagacaaaggtgaggtaactaaaaccaaaatccatccaattagctatttatccaacctctaactctcagaggagaaattcttttttccttggtgtcaacctctccctctacctcctgccctccctcaccttcttcctttgtgtgttttgctctcttttcttttctggtttctttctgttcagcaaaataggggagatgacagcagaggcatacaggagccccagaggaaaggagacccaatgagcaggtgggaaagaaacagcctcctattctaagaagcggctgtattcaagtgatgcaaaaagaggttcaagagcactgtctgtctccctaggtgaaaaagagtcaacacctagaaaatggaatccaactcgagtttcctaacaaaggctctgtaccctacatccaaattcttggcagggcccccaaattacaacccccacgtgaaactgagaagggggctaaaccttggagatacaaggcacgtgacattgataaggaggtgaatttatggcccagcaacagtcaaaagcctccagtcacagctgctgacaagaccgaagagacctcagaaggcaaacttcaagaaacaaccagaatgggtcgttttctgaactctgggcaaaggggcaaagggaaaccacactgtctcaggaggacgaagaacccagggaagccatcagggagaaaaataaagtggccttcatggaggaaacacaagttaaggttaaggtcattctacgtctcaacactgcggacatggaaacaccacccagctctgtcccttcctgaactggatttagaatttgaaatctaccatccaccaaggcttgttctgcatgtcccagacacagactagaagcaaacaaggactagtgcaaacagaaagatctttccaagttcatcgtaaggtgggtttgtccccagtggaatagtggcctcaggagatcataaacacactggtagggtgggcttccagcactggggaggaatcgcacagggcctgaggccccaaagcttccttccaccactgtgaatttatagttccatgcgcttctgcacttgttaaatcaggtcgctatttgttgtctactaatctacaaacctgaagcccccagccagcagaggccactctcgatcccaccccccagccccagttcactcccaaagatgaagacagagaggactgtccagtctctaaaagggaagaaggagcaagaacaagacatggaaccagaaaataaaataaatactcatcttatactcccaacttgaaatgcacatacaggcagcccaacagcctgtagataatttggtttacaatgatatgcaaagatgcagacccatcgtggctgaatagtttcgtacagttagaagtgaccctggaaagaatattactgacagtcttgccttaaaaactcttttgcaaaagacatcatggtcccagacttcagcagttaacagatggaaattaacttcacttcaagtcaaaaacctaaaatctcgccgggcgcggtggctcatgcctgtaatcccagcactttgggaggccaaggcgggtggatcatttgaggtcaggagttcaagaccagcctgactgacatggtgaaatcccgtctccattaaaaatacaaaaattagccaggcatggggcatgagaacctggaatgccaggtactcaggaggcactagaaccctggagggagaggttacagtgagccgagatcatgccactgcactccagcctgccagcctgggcaacacagcaagacggtatctcaaaaaaaaaaaaaaatctaaaatcctatttttcctttttaaaaaaacaccccttccccaagtaaaagtcaactctgataatggggagatctacataatgtttaccttaattacttcttccccaaattgaagtattcctccctattgtgctagaaaccaaaattaaacagcaccaactttccacagaaaccctcaggaatgacagccactaaggaaaaaaggatgtaaaagaaaggatggagcaagaggaggagggggagaaggctggaattcaggctttcctgtgaattcgctttgaaatgcctagaggccactggatctgagtccccaagaaaatctggtagagaggccagtgaaccagcataaagaatagaaaataaaggagatgtgttaaataattttgattttggccacgtgaagaagtattagtcatacaggtaacaagatcttacagggagatgattccaaggctcggcttgacaacgttaagtgtatatccattctgggcctggagtgccaattacatttccaaattggcaattagacacaatgtcccaagacaatcaccaaataatgccaaaaacaaagcaagttccatcttaaagcagccattcttttgaaactgcccttccctcccgtgcctgactcatccacctcacaaacaactgcccattatgaactaaatccttgttagctactgatcaagagaaaccaggtggcatgaataattaaaatccacgaatgattcaagcaccatgttgtcaacaaaccaagcccatctctttcaccaggagtttctccatagcatctaacaaattacccaaaaaagcaggaaaatatatttgccacccccaaccaatgcattctcgttcagcccccagctaactactggaaagagccttccaacatctacgtgtgtttacatttgcatgactcagttcctgccctcaaggagtttgcaggcaattcagagatcagatgttcatattccatgagaagataactgttttttcctctgctcagcctgtcaagtactaataaaagccctaacaagcagggagtcagaactgggtcttaattatttttcccccagcacctagcttggtttctggcacatcgtatacacttaatatgcaacaaaagcaaaaacaacaacaataattataaccagaagacttctttgagggcctactgtgtgcaggccgccacgatgctaggtccttcttcattctgcctgctgcagacactcatggtgctcccctctgatgatgaaacaacataaaaagcacatctcatggaaaaagtccctgacagtgtgagctgtgaaaaaccctggtatggtgagaaaaggagctactttcactttcatcttctggaattcttaagaagtgcattggagggccacacagcacggtgccacgcgtgtcccccagtcactccacgggcagctcttcagccaattctttgaggttgaaccctccatttgggaaggcccacccaggcccctacagaaaatcaggctggcagtcttaatgcccactgacttcaaacactccagagggagtggtccccagccagcctggggcatcaccgcagtgcagccctggtgacaccaccagcctttaattttgcaaggaggtagtttggctgggttgccctcctggacttcgggaagtcacaccctttgcagaatgaccaactggcacgaggaagagcccacacattggtgggtaacacacagaccacaccctgtaaacactgctctggccaccacaacccaaccctaaatccacaacgctgatgggttccttaggagcaggcacctggaccatcagttttcgcaaataagagcccagcccgaaccacagctaccctggtctgaaaggagttttctccacccaacgatctggcagagcaaaccttctgcttctcatcccttcccccttcaagagctgggaatttccacatttaaaaataagcctgtcttcagggatggactgcacggaggctgagggatggaccagatccttgatactcaaagtgtggtctgcacagcatcagtatagcctgtgtctcgccagaccagcataatctcaggtcccacactggatcttctgaatcacagcctgcattttaacagctctcggtgattcctgagcatattaaagtttgactaagccaggcacagtggctcacaccactgtgggagcactttgggagaccaagatgggaagatcacttgaacccaggagttcaagacaagcctgggcaacatagggagaccccatctctgtaaaaaatttaaaacctagccaggtgtggtggcacacacccataagtcttggctacttggggagctgaggcaagaggatcacttgagcctgggaggttgaagctgcagtgagcagtgatcatgccactgtactccagcctgggcaacagagtgagaccctgtcccaaaaaaaaaaaaaaaaaaaaaaagtttgagaagcccaggcctagagacactctccagtccttggagataaagatgtgatattcccactgaacattccccaggttttctgtccaaagtgctaggacacccttgcctccgagggtccctgggtttccttttctaggtgcctaatgcgtggggttccacccacccaagaagcagttctaaaagagacatccttggtctgctccctgactgtgcacagaaaggcatggccctgtctgatccccagggatgtctccaagggacccagtgttccccacacggcccagggcctggcatcacagcacaaacagccctttcactggaaccacaaaggcgaccttccaggggatctgcagcttggcaaggtggtattggctgctgtgattcacagattagcatggtcactgccagtgtgagccgggacgcccactttgggaaggaggtcctggcattgcaatcgaatgccaatgtaactgtttctgcaccaggcctctcatgccctgatgagagagagagaaagagagagacagccccaaagcaagcacttactcctggctatcagccaccaatgaatgtccccatccagggaacaaaatagctgtgaggcaaagagaaggtccatttggacttaccattggaatgctttatcccccaggccaaacagcagggggcaggcagctcttcttttcctcctgttgtatgtttggtcaagtttcctgggcacctagaagcagggctagcccaaggctcccaaagggaggccataggttctcagtgtcctcctaggaaatgctataaaatggggttggtgaaaaaaaccaccccatgaggctgtgctctatcacagacctcaatttgcaggtgaggaaactgaggcacaaaggcatgacgtctttgcccaggatcacaggctgaaccttgggcactgcacagcacccctgacactgaagcaagactgctcacaggtagcacatttgagggcattttaaccactttctctaccagcaggatgccgccaagcctgtgatgtggccctccaaaggggaagctcagccacgccatgcctgctgattttttttcacaaggtaatttaaaaggcaggtgtgccacagaacacacttggggaaacctggcctagggggtgtcttggaaaagctggtctgggtagacagtgagtgtcctggccaagagaccgtgacatcacttgggagacaggtctatgagttctggacttgggataacagggatggaatttgtccctcctcaagggtacaatgctggacaaccatacctgcccaccaaatgccacagtgtttcccttctgccagcccagcagctcctggtcccccatactgtcgatgttcgtccactgataccccaccatcaaaactgtaaccatcctgccaggaccccatccgtgaagcctacctctgctgccctgccctaactttccagccttgcaacagccaagagccataagcccatgtctcagtctgactctaaatggttttttgatctatgacagtatacttcaggatctaaagcctccttttggctcaaaaactttatttgttatagtctgcgcccttcaggggctataagttcaatgaatcaaagggaaaataaactcagcacttcatgaagctatgatagttaccacttacaagaggcctgctaagtgtctggcatttgcagggtgctatgtgcccattattcctgctccctataagaaccctacaaagtaagcatcagtatgctcttggtataggtgatgtaaccaaagctcaacatggttggcagtcaaagatgccctgctaataaatgtgagatccatgatttgaacttgggtttgcctgattgcagagtcttgtactaaagtgtgcatttccataaagagggccaggggctggacgccgtgcctcacgcctgtaatcccagcactttgggaggccaaggtgggcgaatcacaaggtcaggagatcaagacaatcctggccaatgtggtgaaaccccgtctctacttaaaatacaaaaattagccaggtgtggcagcgtgcgcctgtagtcccagctacttgggaggctgaggcaggagaattgcttgaacccaggaggcgcaggctgcagtgagccaagatcgtgccgctgcactccagcctgggtgacagagcgagactccatctcaaaaaaaaaaattaataaaaggagagagagagagagcaaggaatgaggagcacgagctctctggacaagggcaggtcagctggagctcccccgtgactaggacccaagaactcctccaaggccaccccaagtgatctgctcaaaaaggagtatctcaaggtcatctggtgcagccaatccccaggacaggatgagatgaggcacaagggccaatctggaatcaagagctccacggcactgaagctccagccctgattgactgcgtcaggccagaccctgggtaattaccaagctgtaatgggatctgatatttatattagtcacgagcctgacagagaaaacgtgttgttttctcaggcacagccatggagacaacatctcgataattcattacacgcagaccatccttgatcaagcccaagcttctacaaggccaacagctcaaactgagaatggaaataactctatgcccagccacactcaggcccctcaacaaaccacagctccaacaggaagttggcctcagtttccccagttatttaaagagaagtagaccacatgctggaagacgagcagaagatggaaataaagatatgtaactgtcccaaggctgaattcctaaaggaattgctagggaactgcaaaacacattctgagctagaaactttaaccctcattcctcaactcctccctctctcctatatcgaatcacagagcaggaagggacattagaactcacagaattcaatccccacattttatacacaaggaaagatagacaccagagaggttaaataacttcttcaaagtcatggctttattcaggctaccagagcagctccctattcaatatagtctatgacaggattgaacttcacaacgtcacacccaagtgaatagagagctctgatgaaatcccacaaggaaaaaaacaataatgtgaaaaagtacagcaaagaacacagtactggaatgactgtgaccaagttcccaacaggaggaaattgtaatgttttcttcttcactttctgaaaaagtccacatgccactcttttcaaaagactaaagtcattcactgtttgagattcagaggccaaaggtactaatgaagagatgtcccacgatgcatgtccacagtcttgggttcctttgatcaaaaaggtttggtgcgatcccagagaccaaacgctcatgaaattggagctccttgctgaattttatctcccacagaatttcagacctgctttcctctggactccagctcttgatcaaaccatcttggggctgaaggagggtgagggtgaacccatctgagggctggtagaattttctggaaaggcagcctatgttttcttgggaaatctagcacaaaaattattattctaagcttaagccaaatacatgcctgtgtatcgagtcttgacaaaactaccaaatacttggaaagaaaaaagaaaaaaagacaaacacacacacacacacacacacacacacacacacaattgcaataaaaatacagacctcaagcatagaaagaaaagcttttaaaaggcctaacttaccgttactgcatataatgagctggctacctatggcttaagtgagcaaatctaggggcaggtatcaagagattctaggtgtgctttaaaatggacttacggtatcaaaaggaacctgcactcattctatactggcctcacatcttccaaacaaaccaccatcacctctcatccctggcagatttcttacagcaactcacttccagttatgtccactcagcaggtcttggggctacaaaacatagccaaatatttacgaattgttttttctaatcgttgccaaaaacctattttcttgagtaaactgacagaagttatgcttgctcatcatttaggagatcctttgtgtgtgcgatgggattagcatttcattacagacactgcaattgcatttatgtaccccctaacataaaaagactttggaagctgtgtttaggaccccaggttcacaaaaacaccacaacttattttcaatcatggaaaaagttttcattatgataaaaattgccccctgcctgaaagaaagcaagctgttaaaaagttcacccagatcactctatctagggaacatttcagaggcacacaactatgagctatctttcccctaaagacagtcgctgaatctcagtaaaccggggaacaaaattcccgagactgttgggggaggtggaggagaaggatggagagagggaatgtgggaatttgaaggctccaggaataagctgttctcagcaggaaggctagtcagggatctggtgtatagggctttgcttaacctgagggcttctctggaaggtgggaggtttgcctccttaacaaataagaagaaacctctacggctgagaaggtaattccaaagaaaactctccgaccagcacctgcaggcctccggagaagccagagaatgacgaagagaatgatggttttcatatttctccctttgttccaatacaccagtattttccaaaacacaaatgtgctgccacaaaacacagctgagctccagcacccaacaggatgtataattaatgatcaggagagacaggctccttcccccctggtgttttcatagccagccttcacccatagccccaggcttccctacttctctcagccgccaaggaggctgctacaagttgctgtgccctgtagaagtttgaggggtcctcggtttaactttactagaaaagatgtgaacatgtggaggctgcaatgtgtatctaccctgcactattcccctggatttcccttccctccaaaacggttcgcgcgtgaagtcccctaggatgggaattactcagaaagaaggcagctggctcactctcttttttccagttctttcttttttattctgcagttttctatcagtgtcgggtcccccactccagccagtggctgtggggaagggaagacatctctagggacacgactacagaccaggcagtgagcctagcaaccatacatcgaaggtgtcgccagcctcagtgccggtgggcgtctgcaccaggaatagctaaagccgacgacatctagccacctcgagcgccagggaagacgctccgcgtaaaaccgcggcctcaggcggactcccgctccagctccgcgctgctggtggcatttccggggacccaaagtgggtggcctgggggcaaaggaacagaggccgaagaacttggggtatgttccactagagcacctaagggacggagtgggaggttacatcagatatgcgacctcgacacattccaaaagtggcagccccgtgggctacccccaatagtgggatggatctccccaacttctctcgcccctcgaagtccccctgttatctcgggccatgctcctcccccgggattcccttgtgcaaaattattctctcccttgcccaaaggatttttcccttctttctgaccccacgaactcatctccccaacaggttcctaaagtatgggcggatgtgctccctctcgcccaccgccaggagccgagccccggcaggtgagcggtgcaaaacacgcacccagctgcccccagcttcctccgtccccgctgagttggctgtccccaccccgcaccacggcacccgagcctgtgagtccccgaccccggccccagccgcagccgccaacaaccctacaataaacaagaggacaggattgagcgtccgcgtcccggagcgcactggctgggggcaactcctcacccccggcgcgccgcccgctgccccgatccgagagcaccgggagagccgagggaagggaaggcggcgaggggaaggcaggcggggatggagggaggcacggcgcggcgcggagcgaggaggtgggctgcaggggacgccgagaagcggtggggctggcgcagagggcgggcgcccggggcgcgcgttaccttcgtcttgcccccgcagtggcagcacacggtccacaggtacttgagcgtccgccagagcaagatgatgaagaggcccccgaagaaagtcaccatggaggaggccaggaaagcccaccacatgcgttggccccggctgtcgcacggcacctccatggtcaccgggatgatgagcgcatccatcttgggctcgtggaccgaggacgaggaggaagaggaggaggaagaagaagaagaggaagaggaggaggaggaggaggaggacgcgtctaggctgagatggttcgcgtggatattgctactcattctaagactgctgcctccgccgccgccgccgccgccgctgctgccgccgccgccgccgccaccatttgccatagctagcaacgggcagccggcgcaggggctcgggggagctcctcccgccgccagcgccaccccaaacacccatcaacagccatattgctgctactgctgccgccgccgccgccgccgcggagcgcgggaggggggcggggaggcgcctgggctcggggcgctgtgcgcgacctggcggggtgcgccgagatatatacagcgagccgccgccgcccgcccgggggggagggggatggagtgcgcgggcagctccccctccccggcccgcgccccgctcgccccgggctgcgctggccccgagcgccgagagccagggggcgccgcgggccgcccgcgcccggggtctgcgccgcccccgggcccgccccggctccgcgcgcggtcccgggtgtcctcggcgccgcgccgcccgccgtgcgccacgggtgtgcgctgcgctcggccggtgacccccttccccgagcgcctcccgcgcggctaacgagccgctctccgcttattaggtggtaactcgttaataatggataatcggccccctccgcccgggcgcccctgcgccagccctcctcccccggctgcgctcggctccggctcgccgcgccagtgcgcgcccggccgcggcaggttcaccgcgtccggccgccggcccgtggccgcctgctagcccatgttctcgggaccccctagtcctgtcgccacgccgctgagcccctcggcctccgctcgctcttcctccttgccgcctccgactcctcctcgtccccgtcctcgccgcccaagcctcttcggcgcgcgccccgcgctccccgcagccgccagcagcagcagctgcagcaactggagcgggcgcggactcaggacgacccaggcgggaggggaggaggctcgccgcgctggctcgcctgggctccgggctgggcaggggtgggcagggcccctcggcagcggcccggcaagcgcccctgacccccagggcgcaaggtagagcgcccccagcccaggcgcggggccaggcgcctctctccaaggtgctgcgcccccagccgagagcggtggggtacactgggaggacggcggggcgccccggtcaggccgtttttttccccaaagagcccccagtggggaggggaggagtggccagctgtcaactggattccacaggctgagctccccaggaccctcgggcttcgggagtgaggaggaccccacgccaggatacacacagctacccacccctacttcgctcttcctgctacctatgtgcccagggtcccgcgtgtggctggagggtagagtcaggaaggccagcgggtggtctgtggcctctgacagcagcaggtggtttctctcctttttccttattagcaacagaggctgcccaacaaagagtaggcagaaatgatcaaggacgacctggcctggggatagtgcaggccccgatagacaatagagttccctgaagggttgctttcctctcatatagtctcagactccatccatcccgtgaggagggcagatgggggaagagggactccagacttcattctggctcaccgttccccatttagggtcttcccttctccccacttaagatgaagaaggagtccgtgtttgttccgtagcgtgtctccgtacaccaccaggggaatcccccttctgacactttcagaaactttgcgccccctgaacagcgtccgtcctcgtgctaccagctggaccccaagtttttccagcgctaattaaatcgaggatgatcacgctcttccctcattgctgcagtggtttccccaaagtttccagctcattagtttaagcctaattggaattctcaggttcctttcagctcttcccatggaaaaggcccaagttagcatccttagctttacacctgaggctgtctccgtgagagtcagatcagccctgcccttgtccttggaggtctctggaaggaagagcgagcaagggaggctgagctgggcagagaggctgaagaggatgtttgaagcttctctcttgcttgattcggaatacattcattgggtttagagtacacatccactaagaaagagtcaaggccaaagtcaaaggagaaaatggaatgaggtaagagttcttgagtatttggttctcaaaaagaagtgtatgtaaaagggagctgcagaaagtgtgctccagaaaatggaattgtctgagcctcctctccataccatcccatagtacctccaacctcggcctctgtgttcagccactctgaatgcatccctgccacaccagacccaagcatgcaaaggccctgggccttttctggtactgggttgggggagcgggacccagaagtgctgtggggatgcgcaggaaggtgactatggcattgaggttcctttattagcctctcaatggctgtagtttgctgcttttgtgcctcagcaatgccaagaaagttaaggacattccttaaatcaaggccaagatttgaaatttaaaaataaaacacccagaacataaaaagggcagcaaaggataggactgtctccccagtgggatatgaaacctccagaatggattccctcacccacaaaattgaaattttgcaaaccagcaaatcccctctggggccttcttagacattccctacagcctggattcccctgaaatgccagtctggggtctactggtaagcagccgatggccgtgacttctgtcaccccaactgcaggatctatagctttttctcctccatcatcaccttcatcacctcagcatctttggagagggtgcttggaggcccctcagatgccatctcctgctctcttcatcacccctgcctctgctgattgaagcttttagcaacttctgtgctgtccaaagcctcggcttagtcaggaatcatcagaaactctcagtgttgatgtcaatatcctttccttcctacaatccccagtctctcacctcctccctgaatggcctggctggtaagcactgagagagtgctaccatccaccagaaatagacattcccaggcctttgcccagttctctctggccatttccacattgttcacaaacttttgcaccacttccagaaaacttggcccctggcattacaaatttaggaaaaggctctgcacagacagaacctcaaacttaaaaggaaccttaggtatctttgatttgatgtgtttcttcatttatacaatcaaaataaagccagaaacttccctgcctacctcgaagggttatatgtgaggatgaaaaagaaggctgggcatggtagctcactcctgtaatcccagcactttgggaggctgaggcggtgggatcacctgaggtcaggagttcaagaccagcctggcaaacgtggtgaaaccccatctctactaataatacaaaaattaactgggcatggtggcacatgtctgtaatcccagctactcgggaggctgaggtataagaatcgcttgaactcgggaggcggaggttgcagtgagccgaaattgcaccactgcactccagtctggatgacagagtgaaactgtcagaaagaagaaagaaagaaaagaaagaaaaaagaaaaaggaaggaaggaaatattatacagatcttaactataattactgtgaccccaaaaatggacaggcaagtctaaccagatcttctgacccctgagctcgtaattgtatgtgcacatgcctgcatgtcatgctgtccacagcatgtccacagccagactgtggccagactccagggcacagcagagcccctccagcctaaatgagctctctgactacccaacaccactccttttcttgccagtccctggacagccttggaaatgggaaaggtatagagaagcactctaagcccagcacatcttcccctaatgtaggtgtgtctgcaggctggaaattgaggtccattgcacaagaactgaaagtctcaacagaagtagaaacttcaccctctgttctgaaaacaccacgagccttatttttatttctaaattcattcaaaagcttcccagagagaagggcagcctctgtaccatgtgcatgtgtgtctatggcagctctcaaagcaaatcagaggtttcaagcttaaatattctaatctgaacagtcctaactgatttaaaagaagtaaaaggaagtgcataaacatacatactaaaaaagcagagtgactaaggtaaaaggagaacaaaaaagattatttgctaaaatgttggccagcatcgcaattaatgtgcaatggattttcttttcctccaacctggacctagttccaatactctgacatcaatcttcgcgattttgcgatggagaagccaggtggtgactctttaaatgatctagcgccctctggtggattttcctggcacatgacattatttcatgaatgttcaaaaaagggacttaatttaacagtctgaaatttgagatatgaaaattccaagaggaaaaccctgctggaaaaaaaaaactacagggagtaggaaggaggcatggatcaggaagatgttggtccaaggatacaaaaattcagttatacaggaggaataatttcaagagatctaattgtgcaacatggtgactactgtggataaacaatgtttttttgtatacttgaaaaccactgagagattttaagtcttctcatcacaggtaaatgataagtatgtgaggtaatacatgtgttaatttacttaagttagccattccacaatgtatgtgtattttgaaacatcatgtacaccataaacacactttttgtcacttaaaaaaataagaaaaattgataaaaaaacaacaaaaccctacagcttcaacagtatgaattatctagttaccagtcctaccagcatataagctgttgtggataaaggcagctaacaaagttcatgttattactatgacttgatgtcagatctcaactgttactgccaccagtaaccctgcccttccttgaatcaccactgtgttttcttttaaagtcagcagtatccctctttctaaccacccttggtcttcacagtctctttgtgaagtaaaaaagtgcagtagtggccaggcgcggtggctcacgcctgtaatcccaacactttgggaggctgaggcgggcagatcacctgatgtcaggagttcgagaccagcctggccaacatggcaaaaccccatctccactaaaaatataaaaattggctgggcgcggtggctgacgcctgtaatcccagcactttgggaggccaaggcaggtggatcacgaggtcaggagatcaagaccatcctggctaacacagtgaaaccctgtctctactaaaaatacaaaaaattagccgggcgtggtggtggatgcctgtagtcccagctacttgggaggctgaggcaggagaatggtgtgaacccgggaggcagagcttgcagtgagccgagattgcgccactgcactccagcctgggcgacagagcgagactccatctcaaaaaaaaaaaaaaaaaatagctggatgtggtggcgcatgcctgtaagcccagctactcaggaggctgaggcaggagaattgcttgaactggggagatggaggttgcagtgagtcaagatcgcaccactgtactccaactggcaacagagcgagactctgtctcaaaaaaaaaaaaaaaaaaggctgtagctattttcccactttacaggtgagaaaactgaggcttagctctgccaggttacttggcacgacaaggaaagtctgttacctctgaagtgatttatctgtttgtaatttataatgctggagagtgggacttacagaacaagctttcacatgcttacatttttatagatatttattttatatttacttctgcttgtaagaataattcatatgtattataaactttggaatataaaagtttcatataagcttcaagtcagtgacaagaaaaaagaatatgtcacatagaatcttaccaccccaaaataaccactattaatatttttatatatttatctcataccttttccttgggtgtgtatttctgcaaaattagggttagattaaacatctaacttttatcctattttcccttaacatgaaactgttagcattttctctaagtcattaaatatcatggaaaacactattttaaaaaatgataattggataacatttcagtagatggcatactcctggcatttagatgattccaaagtttaatatgttttaaaataaattataaaactgtgtgcaaatgacttctagttgtcaaaaaagatgtccagaagatttccactgacatgcttccatcctgtctccagtgcctcgggagagcaggtgtgtgtaggaaagaggtgcctgtggcagtcagtctggccgtgggatacttcccagccctgccccaggtcactggcctcagatcagccaattgtgatgaagaagctttgagccagggcatgttacccgcaaagtaattctcttcttttctaacacatcaaagccagtgcattggaagaaaataatgctgtggtctcatcgtatcctcctcaatcattgcgccacctgcctgccaagatacaaacttgcaagaacatcatcttcattccccaaaggacatccatggctaggtcaaagaaggcacagctcaggcacaatgccctgcctagaattcacctttcaccaccattctgcaggatttccagaataacgattctgcagattcctgtgtccctttcctctctgtgatcagtgtcaccccccagcagaacaccactactgtgggccttgcctctgggaggtaggcagggcaaaaatcagtccacccatttttgctagtgggagaagaaggcaccaaaaggaaaaagattttcctcagtgctacagaacttgtcttcctgactgacagaccaaaaagctttctaatccttttcttagagtattcctgatttaatctttgcaaaagctctagttcaatgcctgggcagtccaggacttgacttcttactcctagtgctccaaaataatccaatgaccgcaatctaagggactgtgcagatgaagcagggacttactcctgcctcttcctggtagcttttgcaatatttgcaagtaagaacaatgctgagatcatccttcccacttacaaaccctcttgggaataaggagagaagtcaggaagtacaacatctctaagagtttcatttacttccaattctgacttgctttcctggtgtctgcttttgtcataatgttctccaaaacaaggtccctttgtttcaggaaaataagtcattgtaccaaaaaaatgcatgcacttttatgttcatcacagcactattcacaatggcaaaggcatggaatcaacctgaatgtctgtcgatggtgcactggataaagaaaatgtagtatgtgtacacagtggaatactatgcaaccaggaaaaaaaatcacattctttgcagcaacatggttgcagctggaggctgttatcctaagtgaattaacacagaaatagaaaaccaaatatcccatgttctcacttgtaagtgggaatcaactctcgggttcacacagacgtaaagatgagaacaatagactcacactggggactccacaaggaggagtgaggaaggggagcaaggactgaaaagctgcctattgggcactgtgttcactgtctggatggtgggatgaatagaagcactaacctcagcatcacacaatatacccttgtaacaaacctgtacgtgtaccctcaaatcaaaaataaaaatggaattttttttaaagccctttgtttcacagtggcctccctggaaggtgcatcccttcttcagccttgttatcccacagttgccaagcaccctgcttcccaaagatgatcatttgatggtttaaaaaattataaaccatgatgcttttatgaaaggtaaggctctttctgtgaaaccaggaaattctgcttttgctatatttttgcaaagataaacatttttttttttcagagcaggagtgaaagtttatttaaaagctttagaacagtaaggaaaggaaggaaaggaaagagaagaaggagagtacaacttggaagatggtcaagtgggcagcttgagaaaccaagtgcatagcttgacctcttgacttggggtttcatatggtttggctgtgtccccacccaaatctcctcttgaattgtagctccctcccgtaattcccacgtattgtgggaaggacccggtgggaggtaattgaatcatgagggtgtgtctttcccatgctgttctcatgacagtgaataagtcttatgagatctgatggttttataaaggggagttccgccacacaagccctcttgcctactgccatgtaagacatgaccctgctcctcattcgcattccgccatgattgtgaggcctccccagccatgtgaactgtgagttcattaaacctctttcctttataaattacccagtctcaggtatgtctttattagcagcgtgagaacaaactaacacagggttttatactttggcctacttccaagatcttgccttaaccctccccactcctgagatcttattgggaagctgctgatcagtttcagctgttttctatctgtcaggagactgctgttccctggctctggctgtgaccaattattactttagagaaacagttaaccccctgaccatcacctgatggttgcccaccactcctaagtgtgttgtggggagccctctcctgccttgctcatacctgactggctacctactataacacgtcccccctcaagagtccaagatcctaaacctttgggggaaaatggatgaaggtcagtcttctgcaacttcttcctgctgacagaggggcggtggtggttctgtgggtcttggcctcttgctagctgtcagggccgacttgggtccatgaattggtgaaagcggtatccagccaggtctaagggagacaggggcaggattttgcctctgtcgtgtcccactgatgaacaatctagaggttccctttagaaaggtgactcttgaatattgagaggacaatatctctcactgaggatcatctggagcttgatgtcctttccccttaaagaggaacctcagatctttcagggccttgcaagtgtattgaggagctgagggcattgcttccaactctggtgtcctgaagccttttcacggcttcactcgggtatgttgtatccagctggcaatctctagtactttaatggccctgggggtaaataataaaacagtgaaggggtccttccagaacaaaaacccaatctagcagtgtcctgcaaaaaagccataaatacagaccaataaactggtttctgggttcaagagggaagttcagtaaaggtcctagtagaaggtgcttaccatatttcagcagaatgctgttagagtcccagaatgtaagaatcaccattctaggaatgctgcctggagccaggaaggagaggtagatcctcacctttggctagaaactgagtctttgagtctcccaccagggaaatttccccagtggattttgcgtggacatctgactaatccagaaagagacctgaaggtgggagagaccctgccatcttcctggccattctagaaagtccaaacacaaagagaaatgacctcccgtttctctgagcactgcagccactacaatttcgtagcatccacagagtgcctcgccagctctttctctctgaggacctctgacatgggcttatttaagcgcaaactttagatgcttccagaaagatggcttgcctacagcactatgcagctggaacagggagactgttagaggcagacactgcccagcgtgtgtctcagacctcccttcagaaaaagcctctgtgagctccaggacactgtgctaaatgcattttctgcaagatgctacactgaattgaaagcgtgcaaaaacatccttttggttatctataaatttcattttgttcttctctcctaataacaaaattgaaagctgtaagttgaacaaagcaacctgcaaactgctctagcagccctgggaactccctgggtgatatatggtcatgggcttagagcttttcatttgacttgctcttggcttttctatcaagatctgtcttggtgacactctactgagatagatgagttggtatgcataagtggcttttatttcagaaggtaatacatattctatttaaagtacaatgacccagaagggaattccagcccctttatcattagtatagaaattcaatggttcataatctggtagctcattgaaatgacttttcattaacttcaatggttcataatgtggtggcccattgaaatgatgttccattaaattcaatgggggatattatttgagtcagaaccaatttacaaactaaacagaatgcaggcacacatcgcactgcccagagggctcgctcggctctctcttccctgggtcttccatgaagactggtgagatcagcactgcctgggagctgaggtggtaggcagagaaaaagcatgtaggcagggcatgcccttccttctaggggaataatagttgaggccagagaccataatgggcaatttacatgtcccaaaattcaatgcacatatttccctaatgcttagaccaccttcacaattttgaccatatcgtcatactgccttttcaattacttactaatatttgtcttcaatagactacttttatttacctaaatttatttcaaaaggaaattctataccactatcttcctggaaaaccaacatcactgtaagtagcaggtaaataaatacagtagtctctcacttttctgcagggcataccttcccagaacccctgtggatgcctgaagccacagatagcactgaactctacacacagtatatacaagtttttccatctgataaccgagaacactgctcaggtactaacaggcaggtggtgggtggtgcatacactggacaaaggaatgatttatatcccaggcaggatggagcatttggcaagagatttcatcatactactcagaatggcagcagtttaaaacttatgaattgtttatttctggaactttccattgaatatttttggactgtggttgaccacaggtaactgaaattgcagaaagcaaaacctcagataagagggggactactgtaataataaaataaaaataaataacaaatcaaaatataaatacattagaaataaatagaaggcaagtgtaaaagtaaatataataaatgcaaacaatgctgtaaaatcagagcttgctgttttcaggtgaaagccctccatctgaagcctagactgcctttgctaaaaggagaaattggtaagtgttgtagagatgttccaggcacaatgaccatctctgtggcaatcaggttagagagggaattgggcagggcatgactttcccactgagtgccaagaccggagtataagctcaaatcatcctttgtaccgcgtggggtcaagcagcctgcctttttggaagcactgctttcctactcgttttaattcttacacgaggctgggcacagtggctcacgcctgtaatcccagcactttgggaggcccaggcaggtggatcacctgaggtcaggagttcgtgaccagcctggccaacatggtgaaaccccatctctactaaaaaactacaaaaattagccaggtgtggtggtaggcacctgtaatcccagctactcaggaggttgaagcaggagaattgtttgaacccgggagatgaaggttacagtgagcaaagatcatgccactgcgctccagcctgggcgacagagcaaggctctgtctcaaaaaaaaaaaacttacaccatctcctaaagtatcacccccactatacagatgtggaaactgaggctcaagtaagttaagtaagcaacttgtccaaagtcacacacagagtgtcctcaaggtcagtgcacagcattatcaggggtcactcagccctctgaccctatcgccatctgggccattataattctagaaggaaaagcacattagagattttgtctgacttcctctttttagagtgagaaaagtgcagcctagaggtgtttaataacctgcccaaagcctctttgttccccagcgactgagctgaggttagaatccttatctggtgtgctttctgtcctctcaaagtccacc

SEQ ID NO: 51 - DNA, 729445 bp, Mus musculus
tgtcagcaagtcctcagctagggtaagactccgtacttacctcctccttgctatgctagggctctgtctggcttgagcttgcacaggtctcatgcatgctgtcacagtcgctgtgagttcgtatgtatatctgtctcattgtatctgggaagcagcatccctgaagttacccaccacctctggctcttataatctctctgacccttcttctaggaaggtccacagagatggactgatcaccactacgattcatggggtgaaaggtaccactcctctgtgtgtaccagacagtggaaatgcaaagatgtggcaataggcttatagagccactcttctgcttttactagcagtggtcaaaggcagtgaaagaccaacacctaccatgtactaaatgccatactgagagtggcacctgggttcttccacctaatactcacaggagtgcctcaaggaggccatttattgcccctgctctgaagaggacattgaactatgaggaagcaagaaacccaatccataccctatagctagagagaggagcagcagtgatgtctgagtgtagctgtgtgcagaaacacatagacttcagttgggttatgatgtcatgtattttacttcacaaggcttgggggggtccttgttatggtgggcacagcagctgcggacagaagaccctgttcaaggaagctgttagtaccaagcctgaggaacagtgtagggtatttaataaatctctccctaataaataagtaacactttttcctttgtagacccgagaacttcatgatggagcagcagaacagcacatatggagacactggcttcctcttcttcccttggttataaagcactgcccactaacctagagagacctatgttttggacactttcctggcaaggaggcccatgcaggtgggattcccaggaaagatgtcacacttgaggctactggtattggcataatgcctgcctggctgctcaaagcctgcctgggctgtcttttctggatgttgtttctgctggctcttgctctcactaagcctcatcctgctaatgcgaacacaataaaggggattcttgctatgcccccacctcctcacacacagcccagggttcctcctctctcactcacagcctgaggctgcccatgttctaggggtaccccaggatgtgctccgcaggaacaccccacatctcaagcatacattcttcctgagaaaggaaagagagagtgagaagagagagagagatcaagcagtgagagcaagccgatgatggatggatggatggatggatggatggatggatggagggatggataatagatagacagagaaacgtgttgggaatctgccagcaggattctgtggtttcctgtttatacttgtctcattctttgtaagctttgtggcccatctattctagccatacccatctgtgctagagaaaaggctaccaggaggaggtggtcaaccctggggttctatgtccctttttctttgttgttttttttggggggtctctctagttctctctgttgttttatttcacatttactcttgcttctcttcctctctgttctaggatgttgccccttcccacaactttcctccaaaggcacagtgggacacctgccctttcgtcctccatcatcattaccagcctccccaacctagagaggatcctgattttcctgtcaccgcaggacccaaccacagaggtgcttcaaagctcttgctttggtctgatgctgcatccgacccagttccagggagaggctcagagctgagtggccagctgtacctactgtgtttaaagcccagtggaggtatgtcctgaggttccagggtccctgcctcagcaggtgctcagagtcccagatgacatgggaaaagactccctgcatgcctgccaccagcctggggacttgtgaggctctgcatgctggtgcacagctgggtgaagccacactgggcctctgtaggagcaaaaggctccatgaattctagagacccagattagcattttaaagaatcatctacagagacctgctgggaataggggggaggagaggaagactcattgcaccagccccagcaggcccatctgctgcccaggtagcattagagagggcacaaagggtacaggaaaggtttctaacttcagcttaggcaaggcagcaaagaggctttgggcattctgtcaatcatcttcaaacagcactgtctcaagtctaaaaaagaacacatcagaccaagcctcactaccattcccctctccccgaggaggtcctggtgaccaccaggcatgctctgcactgacctcaggggaagacttctgtgagtagcagctctctctctgagttcagaggaggtacttgcttcacatgttagcatctctctttccacatctgcagagtggacccaatatgagttcaagccagtaggaaagttcaatctctctccggagtcaacacatgaagaatgacttcatcctatgttcccatctcgagattaaatgagaacagtgcaccccattcagttctcccaaacccagttgcccccaagttggcctttgcctcaggttaaagggcctcgtgctcagcaccgagttctgatgcaatgacaccattctctttcatcataccagctcttatactcttatcatgcacttttattttcaagacatccatagcctttcaactactatgtgtggcagtgctgatagtctaagatgtggtgtccggaaatcccttttgaagtgaactaagggtgttggctgagaaccagtgtgacccaagcaatgggggaactgtgtgtgttcaatcctgaagtccatgaggaatccatggcagtgtcccacctcactgctgggctaccagtcatgtttgtgctggcctggaaggaagggtgtgctgtatcttcatatggtttctctgcctgccatctctgctctaggggttctcacacaagtctctgtggaggaagctaggaaagaaggggcagagccctctggactgtgtgatgggaaagataaattctatagtctttagattggttctcaaatggactcaagtactcccatgactttaatggaaagccattttaggaggtcccaccctatgatggaccattggatttaatggacagccatctcgataggctagcagattaagaagcactggacttctaaacacttaacagaggggctagaattcccacctggaccattggacttcagacagaatatgtcttgaaataaaaagccatgaacacatacttgccaatctgtctctgtacggtgtcaccaagtcagaacttgatagaagagctgagagcaagtcagataaaaagctttaagcccacaactatccatcattccaagagttcccagggcggctagggcagtctgtggcttactttgctcaacttacagctttcaattttgtgataaggagagaacaaaatgagattgataactgacttaaaaggaagtgtctgcacgcctttcctcagctgagcatcttctggaaaactgatgtcacctagtgttcttagcacccatcaagcctattcctaaaggtaagtactacagcatgcggggaaacttctgcctctaactccaccttgacctatgtgtgcagtgcttaaggtatctttctggaagtgcataatgcttgtgttcaaacgggtccccagagagaaaaagctgatgacattctctatagatattgccaaaagtcaaggctttagctcctggaataggcagagttcatatctctccatctttgtttctctctgtctttttgtctctctgtttctctatgtctctgtctgtctttgtctctctgtctctgtctctatctctgtctttgtctctacctctctctctgtctctatctttgtgtctctgtctgtgtctctgtttctctgtctttctgtctctctctctcatgtgtgggctttctcgagaatgtctagataattgactgtgtcacctctatctttagctgtcctttagatttgtaagataaccacaccgtatgccctggaaaatgccaccaatgctagacttaaggttgcaaatctggggcaaaggtgagaccacctctaagattcctgtgcacagggaacaatctttgctttaggttgaatacattctgagacgttcacagcattctgtggaaacatggccagctccttgcatgaatatatttgatgaacttccctcttgaactcagagaccagtttatcgctgtgtttcccttttatggctcattctcttgaatctcccagggcgctgctaaattgaaattttggttggtttgttttagaaagatgtgagcaaagctgtgtttcttggtttcatacaaacaagctcacccctcataaaatatcatggctcataatctttttgagccattagaattgtacttcattttggaaaatagattgtttggtaactgtggggatactgaagccaaagatgggatagacttccaagaaagggagctgttagctgttacagatgtgtgtgtgtgtagatgtgtgtttgcaggtgaatgtgcatgtgtgtatgtgtgcaagaatatgaacagaggctgacatttagtgtcttcctgcattgcaggccaccttattttttaagatagggtatctctgtgaacttggcattcaagagtttgcctagacaagctggccagtgagtcccatggatcttctttcagcttctccagcactgagattacaggcaagtacatatggttttctaggtagatgcaagggatctgaacttgctcatgtcccatgcttgcgctgcaggcactttatcctctgaactaccttagactgtgtcatcacaaaacacggtgcagcatgcacaaatcagaatcagaagccaggaagcccatcccgggccaccactgacatgtttgacttcatggattcttattcccatgagtgtttctaagcaggaagtttgctctcaacaccattctcatctgaggggcaggagtaagtcctctgccccatctatatgctgtctcgtgtgccaaagtccttatttattcaggacaaggaattgagtgctggactccccagctctggaagcagagcttctgcacagattaaactaggaaccctgaaggaaataaaaagagtagccagtgctttggtctggaagcctgaaacacacaggaagcacagagagactcttcctttttgttttctctcagcaccatagaagaaagcagactctctggttcgagaagcctctctcaggaaggactcaagacactggtagtctgcttgagacaatcctagcagagtcgacagggacagagagatgagcagaattgtcttctggcagtccagcaaaatggaagtgaaaggtgccttccagtcagggcgtgatctctgagttgactctatcaaccatgaccctaaatattggtaccatcttggacaaaggagagtgtatgttcctgctagcttccatctggactgcagaagggtctatggctgaggacctgcaagagcatgccacttttctccaaaggccatggtttctctccccgagacagggtttctctgtgtagccctggttaccctggaactcaccagttcttgcctagaccaggcttgtctggaactcagagatctggctatctctacctcctgaatgcctcctgaaagctgggattaagggtgtgcaccactgtgcctggctaaggcaatagttttgatgtgttagaaaagggggcaattactttgagactctcatgccctgactcaagttctttgctaggcatgggctgatctgaggtctgtgatgtagtaaggggcaggaaaggaccctctggccagctggtctcagctagacatctactgaggccaggatgtaagaatatcaatggaggccttctgacatctctcagctactgtgagagatttgcacacagttttagagcttacttttatatcaattttttaggataagccacatgtcagtagtatgccatctgctggtctgccactcagttgtccttcttgctgtctcccaagctctttaatgacagagaaaatccttatagtttgatgttaaaggaaagtagcgtgaatgttttatgttcagacccacaggaaaagtctaaaaaaagtctaaaagtggttagatgatctgtgggtggtgggattctagggagattcaatatcctcttatgaagattctgtagtctgattttttttgtaataagcctgaattaatcatttaaacagaaataaatacaaagcaaatattaattagttatgaaaagaaaacctaacctactcagatctgctttcttagtctctttccacccaacgaacatttggaaacccaaaggcccttggatatagttttgagagttgggccactgtgcttctcctcctttgtcataaatcagaaattgttccagagatagaggactcttggcatgtcaagtagctcgatggagaactcagcctccttttcttgaagctgtaaggaggtggagtagctactttcccatcttctaccacaaataaattataaggaggtgagaaggcagcagtgcaccatggtaattgtgtatgtgtgtctgcatgtgtgtatgggcacacatatgcttgtcgatagtatgtgtgtttatttgtatatgtgcttgtgtgcatgtgtgtatgtgtacacatatgtttggtgaccacacttgcacaggccagagggcaacctcaagtgtccttcctcagacaccatcccacttttctctgagagttttctttttccctgtcactcatctagtggttagtctgactggtcagtgactcctagggatctgcctgctccagactgtccagatctaagattttaagtgagcctcatgcccagttattttttttaaatgtgcacattagttctgagcgccaatctcatgttgccaactctctccagcttttcacatcatgataatttaaggaagtgtggagatactaatgacagtcatagccaagatggagcattagattgtgttgtggaaagaacatgaactgggccatctaccttcataccaacactttatatggtacagaattcataagtgaaaagttgatatcatcttggatatgatatttctctttacttttacttaaagcatttaatttattcattttatgggcgagcgttttatctgcatgcctatatgtgaaccacatgagtggttgatgccttaagagattagcagagggcaccggatttctcagaactagagttccagatggttgtgagccattatgtgggtgctgggaaacaaagtagggtcttttaggagccacacatgccctgagccgccggggcatctctccagctttaacatttaaacagacaaaaattgtatgtatgtatattgcacagcattatttgaaatatttattttttgtgggatgaatagctggtgaactcaagctgattagatattacctttttcttgtatgcatctgtggtcagaacccttggtgtcccttctcaagtttactaaccattattaactgtagtcagcatgtgtcctctaacgactatcacccaaacccatcgttccctttcccgtgcttacattgtttgtttgactgtgaaatgttcttcaggattttcaggtctcaactgaatgagtcagcctccctttgaatagtcaccaagtagtggtctaccagaagacgccaccagaggacgccacatcacttagggaggcattactgaatctcccaacagattcgtaattcctttttgtaatgtgagtctcagggttcattaggtccaggctggggctggagaaaggtgaagctcagtgacactgtgacactgctgacatctgcgtagacagcctttcagtctccctggacttcatttttgtttttttagtttgtgtgcttgtggtcttcctctcatgtacttcttttaagtcccatgggggaatacccagcttagaataggtaacagatttgaaaacccaggcttgctctgaaggtgaccatagacacatgtgcatttgctgaagagtctgggaagctattaaatgtatttacaggcaaatgaatggcctcactataagtttctacttttatttctcctgcttttatttcttgtacaatccttctagatacccaatctgtagacacgcctacagaaggtagagatgatgctctggggttatttgtagatacttctagatcttcccattttccaggctaatgaaagagtaaaaagacaatcagtaggcatgggtgacagatcctgtgcaagctggatgggttctgttcctctggagcttggccacagcctggtatgtggccctctgggataaaggctacagacagaagagctcagagattcctgcagctgtgtggtcctgctccaactgtctttctgaggggctgtgtgggtgtacagagcagtaaagtggaggcaggggcccctaattgctgctcttcccacggattgcactctatgagcaaaacccggggccagaagatctgatctggtcccagtttgtccagtttatggagtgtgtgtgtgtggtgtgtgtgtgtgtgtgtgtgtgtgtgtgttgtggtgtgtgggtctaatgcacagtgcttggagggcataggttgatgccagatgttttacttagtcagctttctaccttaattgaggaaggctcaatttggagcttacccctcctggtttaattttgtttgtttgtttgtttgtttgttttgttttgttttttggctttgctattcatcctgaaactcccctggtatctgtatttctttctacctcccagcatcagagcatatcactatgccttgattttatgtgggtgctagagatctgaactcaagcatttttctcaccaagttctctctcttgcctctggtttctgtttttgttgtagctctcggaatgaacagcacaagcctgtgatgtccaaggttccttttgaatgtgaggttcctctgtgtctagggggagagcctcttcttaaaaggctggtcagagatgggcaaaggcctgatgatatctacttctggtagttgggaatactctcattctgtgcctatatcctgagtaccctgagttcacacaggaacaggcaataatattgaccctgaaggtctctgatgaattctgatcaagtcatggttttggacaacactggagatgctgaaagcttcagtcagcaaagttaggggtggtgcgagagcagacagagtggtggctggagtaggtgtcttatgggacttctggagccctttaaatgatgatgatgataatggtaatggtgtggggacttcaaatgtgagaggacagaaggcacagcagccactagcatcttgttaagtcatcatgataatagttttcagggggatctaggttgtagatattaggtaggaagaacctagagggtaccactggctgcaaaggttcaagttttgctcctatgggaatacattctgaaggctcgatgacccatggtggggcaggacagtacctgtcctttgctgacttatgctatgaatgttatgagttttaaatgttaattcttggacttaaggaaagtccctcaggcttgtgtcaaggcacagacccagctggtgagaaggccaataaaggaatctcagtaccgcagcctcttgcacctctccccagcctttcaaagttcaactaccccaggatgttggaaaagcgccagggccattgaatgcatggggattgtgttgcagccctctgagtgcagaaggatggatgatgctgaaggggagactgaggcaatttctgcttctagaaaacaccatttattgctctcttctttagcacccccctttctgtgtgtgtaaatgtgagtgtgccccatagcatgcacatggacatgagagaatggttaacaggagttagcttattcctttgactctgtgaatttcagggatcaggcgcagggggtcaggtttggagacaagtacctttaccagcagagccattttgctggccttctgttgtgtactattttatgggggaggtgattttgaccttaagtcttttctaatggatatgtatactgagcccaaggaatgtaccaaccaatttgagactcacatattttcagtgtctgccaggcttggccttctttggccctctgtatcctagggccagggtgtggctgaccaatgatttaggtcgagacagcttgttcaggtaaggaggctcctttgggccagtttaccatatgaagagtcttgaaaggaacctgagaattccaattagactataactaatgagctggaaactttggggaaatcactgtgggcagtgaggggagagtgatcatcttggttttaattagcacaggaaaaagttgtggtccagctgccagcctggagaagtgtccagagggaggaagtttctgtgtgcaacgatagggggactgggggtggggcgggggacaggggctgctgaacaatcctggactccttccctttaaaggggagaaacgggagaccagaaatgtagaaaggcaagcctgaatgcagagtacccgtcatccatttgcccttcccacacgagtctaaagaactaggaagcagccctttaagaaacctccttttctacccagtttgttccacaccaaccaccaggctgctgtcatctttgcttaataaggaaacaacaaacaaacaaacaacaacaaccaacaaacccacctgcagctgtcagaggtcacagactaccaacagacttccagatgccccagttgttcatcagcaactcacaacgtggcatcttggaaacgaaagagtgaactctctgtcagcaggtgtactgtactggctagggtcttccttagtctccaagccttagaatctaggggcaataagtccactgaatctagctgacaaccagccactcctctccctattaggggcccctttgggaaaaccggcctaccccagacacctggtggtttccccttctggtaccctgctgagcctagaggggcgcaacacctgcaaagtcctacctctaggctggtggcgctatactctacatcctggaagatggggggccgcatgccccaccactgccaaatgacctgctgcccctacacagccccaagccgaggcgagttagcccggtaagcctcctcccctcccgcttcgggctgtttgagcccgcgcccgctccagttgctgcagctgccactgctggcggctgcggggcgcgcggggcgcgcgccgaagaggctcgggctgcgagaacggggacgaggaggagcccgaggaggcaaggaggaagaagcgagcggaggccgaggaagctcagggtcacagagacccggcccgaaggggtcccgcagagcatcggctagctggccgcggaggcagggcagaccgccgcaaccaacctgccgcggccccgcgagcacaggaggcggcgatccaggagcggagcgcagccccggggaggaagggtggcgcgggcacgcccggtcgggagggcgcggattctccgatcctaaggagctgtcgcctcatcacccgagagagctgtgcggggacgggcgggagaccccgggcccgggcgcagcgcacacgcgtggcgcacgccaggcgggccgggcggcgccgagggtacgcgggatcgcgctcacggagcttcgggaggcacagaccccgggcgcggaccgcccgcggcgccccctgggctctcggtgctccgcgcagccccgggggcgatcggggccggggtcggggagtgggagccaccctccctcatcccctcccccccccgggccggccggcagcccgggggagggcgggcggcggcgcttggctgtatatatctccgcacaccctgccaggtcgcgcacagcgccccgagcccaggcgcctccccgcccccctcccggcgctccgcggcggcggcggcagcggcagcagtagcagcaacatggctgttgatgggtgttcggggtggcgctggcggcgggaggagctccctcgagcccctgcgcctgccgcccattgctagctatggcaaacggtggcggcggcggcggcggcagcagcggcggcggcggcggcggcggcggaggcagcggtcttagaatgagcagcaatatccacgcgaaccatctcagcctagacgcgtcctcctcctcctcttcctcctcctcttcttcttcttcctcctcctcttcctcctcgtcctcggtccacgagcccaagatggatgcgctcatcataccggtgaccatggaggtgccgtgcgacagccggggccaacgcatgtggtgggctttcttggcctcctccatggtgactttcttcgggggcctcttcatcatcttgctctggcggacgctcaagtacctgtggaccgtttgctgccactgcgggggcaagacgaaggtaacgcgcgccccgggcgcccgcccctgcgccatcccagccgtttctcggcgtcccccgcagcccacctcttagctccgcactgtgtcttgcctcctgctgtccctgccagccttgtccccgccgcttgcccttccctcccctctccttgtgccctcggattgtgcgccaggggtgaggagttgaccccagcaggtgcgctccaggacgcagacccccgctttagttctctgtttattgtagggctattggtgactatggccggacccgggttggggggacatgtgtctcttgggcacgttgttgcggagtgtggagaaggaaccttgcagggacacaggaagctgaaagaccctgggtgcgtgcgggacaccactcactggctgcggccagactcctcacggtggactagttgggacagatcagctcatacttttgttgttgttgttgttgttgttgttgttgaggaaatcagttcctggggtcccaaagaagggggaatcctttgagctagggagaaaatcttttgcatctgggaattctgggggggaaatcatggagaaagtgggggcccacggatcaataaaaagttgggaagacccatcctagaatggggtcaatctatggagagtcactttctaaaagtggcatggttgcaagtctgatgtcaccgcccactccatcccttacattttctttgtggaacattaccctaccccaagtacttttgccacctctacactcccctcccaggccatcaactttggatccccacaaatacagccagcagctccaatctgtagcaccagggctgcactcctaagagtccaagggacctctgcttcactaagcccccttttggcacttgatgtggctagaagtcgtcttaagctattcctggcagagtcgcccacagtgttaggactcacatctcagatgtgtggttgctaggctttactcctgggctgtggccatctccctagaggggtccctgcccaccacctagcacttgctggggggcggtggaccgggggtgggcaatgtttgagcgagaactacagaatgaataaaagaaagaactgggaaaaaagaggagctgaactgggtgcagtcttttagagaaattctcatccaagaggacagaatagcacccatacttttggacagaggatatctctagggggattgtgcaagacactcatcttggtccccaaatgttcacacctgctctagaaaagttcatccgggacccccttgagaagtcacagggctcagcaacttgtagcagcgtacagctgctaaagagaagagttaggctaagggggaaggctatgaaacccaagggcaaccgaagcactctctgtcattaattatacatcaccgtaggtgctgggctcagctgtgttttgtggcagcacatttgtgttttggaaaatactggtgtgttggaataagggaggaaaaagaaaaaaaccacccttccttctttgcttcctcttggcattgctctgaaagcctccaatggtgacaggtgagctttgtttagagtccccttcttgaggatggaggttcccccttccttttcaaggagaaagaccgatggccttccagagaagccctcagattaagcaaggttcctatagccagacccagagatggtctctgtctgatcatagaatcacattcacccattctttctcctgcatcttcagcttgtcctgggagtgtctccctctcatactgagacttggtgactatctttagttgcacgcatctcagttactttctatatggaagtgacttgggttggctttttaaaaaaactactttctgttttcagaaagtgaacaaatttggtcataatgagtcctttttgtctttctaaggttttaagcggagcgtctagcatctttttactctagggggtaccctgtgctggtatagtgtgtgtcatgaaatgtctcttaaggaatttacataaagaatcccctttctaaataatgaccagaatagcttttgccagttttctcagaaaaaaggttttgtgtaacaacaattaaaaaaaaaacaaaacaacaatccgtacctattcctctacatatattttagctttaagactagtggagtgcacacagttgagagtttcaatgcagaccctggagtaaaagatgattgtggttgattggaaagattgaaggtcaaaacagaatagcatcaagctctttttggtactgtgagttcctttagaatcgtgcccagttttcttaatatctgcctcttgattcgttggattaaattgtgcgtatactcaactccctgtacctaacaatggtaaaagagaatttttaggtgcttccctttctaccttctgggctctgcatttgttttgcagttattcatctcctctttgctttccaagtattcagtagttttgttaagactcggtacagaataaagaattcagctcaagtttagaacacttgtgacttgccaggctccgtaagcaatcctctgctgcctttccacagaatcttctgcccaccctcaagcctctttgcccaccctgaccctaatccgggtccagtgtggcttactaggagctggagttccggagaaggtatcttctcagcatctgacattcctgaggggacatgtttcggcaggagcctggaattttatatatttgttctccaggtctgcaccgtggttttttggtcaaaggaacccaagactgtggacatatatctcagggtctctgttcatttgtgcctctggtctccaaataacacatagctaatgacttcatcatcatcattattattattattattatcatcatcattttttttaaaggattataaacatttggggagaagaagggaggaacaaagaatatttatgctaggtgtggtggcctgtgcctgtaattcctgtactcaaagacagtggcaggaggattgtgagttttaagtcagcttggactaggtagccatagcctgtctcagatagtaggagagtgaaacaggcacacagcaaacctcaccactccacccctgattggagcatggttctttgctgagggttttcatgctattgcttctctccaccaccctggattgtatcagtgtgcactggtcatttggccacagaattttggggttcagtctggtcctagattgtagcgagctggggaactgttcaggcagtctgcataagccatttaacctctctggtccctgggaaatctgaggattggaccccgtaagttccaatcacctccctctgccttgggaacacacgtaggagaatggaaggacagagcagtttggggaaagattttaagctcagctttgtggtccttcccattcctttggacacctatgtgtcttcccccaccccctgcccttgttttattcatctgctagcgtgtggtcaagtgtttggggaagtaggccatttgtggatgggcctctggtttgctgaaggacctgcctgtggcaaggcatagacggaccgataatctcagtcagagctatcatccctatagaacctcggtcttggtcaaggatggtctgcatgttgtgaattattgaggtgttgtctccatggctatgtctgagaaaacaacacattttctccgacaagctcgtgactaatataaatatcagatcccattatggcttggtaattacccagggtctggtctggtgcattcaatcaggactgcggcatcagcaccctggaactctagattccagattggcctcagtgcctggtttcctcttgtcctggcaattgccagcaccgatgacctccacatactcttttgtggtcagttcacctagggtggctagggagatactgtcagcccccagtcacgggggatctgacctggtcttgtccagatagcttgttctcattggttattaaaaattttaattttatatgtacctgagtatacagatgtgcatcaagtgcacgcagaagcctgtagaggtcagaagaggggttgggtcccctgggactggagattcagatgtctgtgagccaccatgtaggtgctggaaaccaaacctgggtcttctacaccattggtaggtgcttttgactgctgagctacctctccagagctgctgctgtattgcttatttttattttattttgatggatattttagactctacagttaatagacccagaataaaggctgttgctcccactcaggagggtatctttggctgacagtgagccttatttcctcatctgccagaggagcccacggacacttaactttgtagaattcctataagaagcatcaataacatgggtgtctagtgcccaacaaacacctggcactagcgggcctcttggaagtgagagttaccacagttccaccaagtgagaagctgttttcgctgctccgttaaacagaagccgcagaagggcacacactagaacagatagaatttgggaaccaaaaggagcctccagaaccagcaacacgaggtcactaacctgttcaaagtcactgagactgtgtctcctggctctggattgcttcgagctatggtgatggggatctggtgggtgaagaaagatctatgggggatgccctgacaacatggttgatgtgttgatgatggggctgtgggtgggcccttgatggtattggtgtctcagagaacagggctggcagaagaaaaacattgtaataggcaccgggagatgtagctattcaacagtgtgtccttgaagagggtggattccatccctggtaggccaggcagtcaaggctcccagaacgatgttccctgcctcccagggaggtcacagaatcctaaccactgtgctgtgcaaccagaccagctcttccttggcagtctttacaacagggtttcccaaagtatgttctggtccttgcccttgaagttaccttgggagaaattggtagtgagggccctggctgagtctctactgggaggatctcattataggtctacagaagtctggctggtagggagcttgctttaagcatccttctccccaccccccgtcccctgctacccactgtgtagtagacaagagtcagcctgtgaccttggcaaggacttcagtggaggtgcctcagtttccttcctgtcagactgagactcataataagagcacagccccaagcttctttcccttactttactgcagggagacatggggttcagggaagacgtggagttcatgcttttcttgcaagcctggggctgcttcttcttctagaggacaggaagagaccccctgctgtttggcctgagagagaagggaggcccagtcttttgcctccttccctcagcctctcctcttttttgtttgtttgtttgtttgtttgtttctgagaaaatgatcatgatttttttaattaggtatttatttcatttacatttccaatgctatcccaaaagtcccccacacgctcccctacccactcccacttcttggccctggcgttcccctgtattgaggcatataatcggcctctcttcttgaccacagaacaagtaactgtgctctttgggctgggctgctcaataggtgcttagtagcaggcagtaagtgcttgctctagggctcacttgtttgcaccgcccccttctctctctgtctctctttgaagcagttgagaggacattggattataatgccagggcctctttcccaaagtgggtagcaggagtgccctggctctcagtggcaatggctgtgctaatctgtgaatcacaacagccgacactaccttctcgggacttgagagctgaggagcctctagagagactcctttttggttcgtgggaaagggttgtgtttgtgcagtgacaccatagcccggggacatcatggaggactctgagacttatagagaaaattttcagggtcaggtaaggccaatctcccgcagaacctctgaaattccattgctgtacacagcaggagcagaccaacagtgtctccttcttccagatgccccaagttgctgtattcttggctttgggctcagtgagaagagaattcaggatcccatcctcatgtgcctagctttgtgagaagaaggtccgaagagtgtcggctgggctcagatttctgtctgcaaagggctgaaggaggaatctttgactttcatatatacaggatcacctgaagggctggggaaatggtcggatgcagaaggcccagggagcggcctgagcggtcgtgtttctgtaagagacaggccttgctgatgccatgcagagcctgatgtgaatgaacagtaagggcaggttgtctctgaagatgggcttatcctagaacatgtacacccctagctctcctatgtcatgaaggggtccagaatggacaagaagtggaaggtttgctaacatcagacagtcggggtgagagagatcgatgaggtggtttggggtggagggtgggcctgctgccgggttggatgctcacgattaaagctgcctctttgggtatcttctcccaaagagctttggggctggctttgtggtagccagggtggctttctgtagtttacagggagtggcatgccagttaccagccaatgtgtgggttcttcttcatgccagttggtcacactgtgaggggtgtggcttcccaaagtccagggtagccagttagccaaaccaccatcttgcaaaattaaaggttacagctgtgtgtggtggtccaggaggtcagctgtgagctaatcctactggaaaggttcaaatcaggggattttccacagggacctagggtggcctttaccaaatgggagggagcctcaaccttaaaggtatcttcaaggggaaagagtgctatcttcctttgtacttctcaaggattctagtagacaacagtgcaacagtgaaagtagtgcctttcccctcccctcttcccccacccccccatctgccactactagaagggatttcacagctctaactccgggactttccttgagatgttctttttaggttgttccattgtcaaaggaggggaacttagaaggagccatatgaagaatggccctgtacctggccctctacctgaccctgtacctggaggctcacagatcttcttcttaacgttagcaccgctggttttgcctttatcagagcatacatactgtgccagaaaccgagccaggtgccaggggaaaaaaataatgaagactggttctcacctcttgcccatttggactcagaatcatcagactgagcagagctaaaaccaggtcccttctcatggggtgtgtacagctgtgagtgaccctgagcagtcttcagattccttgagggcagaaattgagttatctagaaagaaacacaagaaacttagggtggtggggacaatgggaggtgcagattcatgtctctgctttgtgtgcatgtatgtccagagcacaatcttgggtgttgttctctagttattaaaaattatattggttgtcatgtgtgcatgttgtggtgcatttgtggaggacagtcaatatccaggagtcgcttttctctgtctgcctttatgtgggttccaggggctacacccaggtgatcaggtttgctcagcaactacttttcaatgagccatcttatcagcttcaccttgttttttttattgggacagtctctctcaatggtctggactcaccaagtagtctaggcttggggccagtattcccgagcgagcctgagtcaccctctcagctgtgggagtccaagcacacacatgagcctagctttgtacataggtcccagggatctgaactcaggtaggtcctcagtgtgtatggctctctgagccatctctccagccccatctttctattttttttttttttttttttggtgtcaactatcagagaagctctgagagggagggaatcaagagagggagagagagagagagagagagagagagagagagagagagagagagagagagagaatggcttgatttggtgacaagctttggtgataaaattctagattgcttgattcatcctagattatgattattcacaccaccacagtgtcttgactagtgggtgaaaaggacttagttctcttgggcagctgtgtgtgaggggggatgagttgggcaaggggcagaaggagagtttcaaaagaatgctctcgttcagatggaatttgcattgtgtttggcattatttggtaattgtctttgggacattatgtctaattgccaatttggaaatgtaattggcactctagggccagaatggatatacttaacgtcctctagctgagcctgggagtcatcttcctgtacgatctcattacctgtgtgacgaatgcttctctacgtggccaatgcagaaattatttaaaacatcttatttacctttttactttcttttgcttttgtttttgaagtactgagtatagaacctagagcctcaagcatgctaggcgagtactctactgcttgagcgacgaccttaactgtttttccattttaatttgtgagcacatgtgtgcgtgtgtgtgtgtgtgtgtgtgtgtctgtgtgtctgtgtgtctgtgtgtctgtgtgtgtggtcttttctgagacagtctcactatgtagcccaggttggccatgaattcgtgctcttcccacctctgctccctgagtgctggcatcacaggtgttaccccagccctgatgcccccatattctgcccatgccgttttattggtatttcttaccaggttttcttgagaacccagatccagtggactctcaaccttaaaatgaccaccagcatccttttcttcttctctgtcttccatctggttgccttcccccttgtttcctttttccacagtgctttctcatcctggagaacttctgtggaacctggtatcatttaattttggtctttaaagacacacactagagcacaatgctaccatttaggcagagatagctagagaaagtgctacatgatttgtctatcatcagagtttaagtttaagagccagccaaagatttttttaaatgaaaaattaaattgtaaagccgggcacggtggtgtagacctgtagtctcagcagatgggaggctgagacagcagtatcattacctccaggtggctctacagtgagaccttgtggtgggagagaggaagaaagattgttacttgaagtaaaatctctcccatacatgatgatatctggagccataatttatattttaatattattattttaagtatttatcattattatttgtatttatgtgtactcacatgtgtctgtgtggatatattctgcctatggagtccagaagagggtgtctgatagagggagctgaagttacaggtagttgtgagctgcctgatgtgggtgttaggaataaaactcaggtcatctgaaagatcagagagcagccttaaccactaagccacctctcagccaaccataatgtttgcataagaggtttagggcaaggttttatgagatattcttttcagaattgtagaaagccattcaggcatgatgggtttgcctatgacatacatggattataaatggagagtctgcatatcggtcagtttccttgccatatcgtgttcttgttctcctgttctcctgagagcaggaaatgctctgttctggtttgggagtgaacttgggtgtgggaggactggagcggatagtggcttgtaagctaggtggttggtgggcaacaaacggggacttgactaagcaagtgtaaccacagctcatggtgggtagggctttggaggtctccccaagtgctggtgctcttctgctcccccagcaaaggggacaagtgtccatgatctcctgaggccaccattgcccaccttagagtggacctggcaagagctttcccgtttctctttgcttgtgccccatggctggggcacccagaacaagtccagagtagtagatttcagactgagcacaggcctggatggcaaagtgtatggatatcaactactctgtgatgatgtcaaagaaccttacctgtgatgcttctgtgtaggcagcttgtcctctccggtcacttttttggctccccctcttctcctgagacagtgaggttccctgttttctagtccttgacatttggaagcacggagtctccagtctgcccgatggttgtgactatgaagatcggtttagtctggctgcaagctgtgagtagtgtgtgtgtgtgtgtgtgtgtgtgtgtgtgtgtgtgtgtgtgtaaggagaaatgggattatgagggtggggggaaaaggtctaaggaaagaaaaagggtgtaacaagacggggatatataggtatatgtgccataaaagcagaaggcgaaactattttgagggaggaggggaccagcaagggtgaagagtaggggagggtgctgaggggggacaaataaaaagtaaagcatagtggaatatatgtatgaaaatattgtcacatggaaccagattcttggcatgctaactaaaaatccattttaagggagagctagaaaaagagaagacagacagacacccccaggagcacagaggaggaggtagggtgtgcagaatgatacagagacagtcacaccaggagcaatgacacttccccgcggggagctggaggctgggtccatgtgagactgacagagtttgatcccagccccttctccttggccctatttgaatatatcaggttgcctcacctccaaggagtggggcagagcagtagaaaaccactgggcacagtgactttcgtctctgcaacagtgcaggttttcacgacactttgttctgttaactgggcccttcaccacagaccagcagcagccccccctttaccccccctgcctttgccttctctctgtgcactttcttcacagtgtctacaggagctgtgctggtggcctgtgaattataggcaccacagccgaacaggtgatgggcttttaaggagtgcagaaatgatgtccctaaccaaaccgtcagggaaatgcaacagttggcatagctctaaaaaaaaaaaaaaaaagaaagaaagaaagaaagaaaaaaagaaaagaaagaaagaaagaaagaaagaaagaaagaaagaaagaaaaagaagtccatttcttataattatttgcaacctattttcctcataagatttagtttttgacttcagtgttttatatttttacttaatcctgagtactgtatgttcagtgtacaatgtagaacattgtagaaatgaagatgtagaccagacagaaaaaaaaaaaaagatacttcacacctgctgggatgagtactgttaaaaaaacatccagaaagttcacaagtgttgaaaaggtagtagagaaattagaacccctggaagctagatgggagggttttttacaaaattaaaaatgaactatcatggttcagtgtttccatttttggtctatgtctcataccttaggaacaaggacctggatgacgtctgtgtgctcacactgagagccgtggtacccgtaacagcccaaagtggcaaccaaggtgaagggagaaaccaaatgtagttcggacacacaagggctgttgtccggctgtatgagggaaggaccttgaatagagaccttcactgccttaagctaggtgatgatacgtagacatgaaagatgggactctactccaacaggcacctaggatggccaactcacggcaagtggtggttcctcaggtgatcgctcatactgggctccgagtttcagctttgcggatgagaacattcagaagagacttgcacaccaatgtgaatatgtttgttactgctgacctgctcagtgagaaacagttaagaaggcaggctttacatttttattttgctttattattttacgtgtaggggttttgtcagcatgtatgtttctgtgccacgtgcacgcagtgcctctggaggccagaacacggcactggatcccactgggactggagttacagatggttataagcagcgacgtgggtggtgggaattgaacctgcatcttctggaagagcagccagtgctattaactgctaaaccttctttccagctccaagaaggccaaacacattttatttatttctaatatttttcaataattgtttttataaatctaacatttggtaggctatggcagaggatctcgatttcgaggctaacaatgtcaaaacagggcctggggatgtaccttagtggtagagcactttcctaacatgcagaggctgcccccccaccccggtttaatccccagcactgataacacacacacacacacacacacacacacacacacacacacacacacactatgcacaccatgcacaccactcacacccctacacttttttcagaaggaaaaaaaaaagtttctccagatcaaaacacacccctggagttaactagtatgtgggtctgttcacttccctgcccccttttactgggaccccattgaccacaacttttcactttcttcttcctgtgggcattcaggcccttgagaggtctacggccttgctgggttggatccacacagccacctgaagaatgagcagtggccctcttcctgcccacagtctgttttactgagatttgctctttgtatatttctgtagtgctggacagtcagttcagggtcttgtgccagccttggaccagtgagcggtaactcgagcccacctctcctctcaggggaaagttaagggctgagccatctcagaattttgacattgacacacgacatagggcagttatcgtgtctctgacaaggcgttgtctgggtcttaggcttcttagatataaattgttcttgatttaatgattttttttcaagtacaatgccacgtaggtcaatttcaaagatatcatttttaccttttataaattccattacttgaggccatagacccagggagtggattttgctctgctaaaaatcacaaaagtggactttgattgacatgttcccaaaactttagtgctgactttgatgaggagacatacttgagaatttcaatgtgaagcagtattaaaaagatgctcggtggctgagagcaggagttgccattgaagagaactgactttggtccccagctctccagtcatgcgatcacctgtcgctctggctccaggggatctgaggctctggcttctgtgggaacatgcgctttagtgcatggacactgtccatgcaccctcccagacacccacacacaatttaaaagtaaaaaaaaaaattaaacatttttaatcagaggacattggaaatactattatgcctgcatttagaggggaaaaaaaaactaatcagatctgggggagaagggaggggtgtggcagggacctgggagggagggagggagggagggagggagtgggagctggggttgagatgtattgtgtgagagaaagagaaataaaaagaaaacattcagacttagggttttgtgactctgttattacttctgatgacatagctgcgtgactactgaaggcttattttgactcttggtgtggggaaaagtggaagtcatcttagcttgtagtctataaataggctgggattataggctagcagtgtttgattgaaaagaaggccatgagaatcaactcactttgaagttttccctcaagtcatcctaaaaggcagccctgagccagcccggtcatctctgtactgttcagtgagcttcccagctgccgaagccgctgtggcaggggcaagctccaggaggggtgacccccaaatgtctaggtgctctctgaaccaaagtccccccaaccataaacagccagtacaccgggacttcctggaattacgcctttagattatataatagccattcgccgttaccagggccacgtattaaattttaacttgtcacaggtaaatgatgttaacagtttgcagagtcacagagtacgaggctgctccggggcttgctcagcacaccagccatcatcccacggccctgaccaaacaaacagaaagagagagaaacaaagggaagcaaaacccctcacaccagcacgagacccttctacagaggagttagcccttcatgagtatgtgtgcgtggtgtgtgttgtatgtgtattgtgtgtatgtatgtggtatatatgtggtgtgtgtgtgtgtgtgtgtgcgtgcacacaggtgattgtgactatgtatttcttacagaactagctaaacatttagacagtagagatggcaactgcagagtgatgtgctctgttcatgggcaggaagcagatatgatagagattttctgttttcgttttcccagtgacatgacgacgtgaacacctttttttttttttttttttttttttttagctgatcctttttttaagttggcagctgaaatgctagcatgctaatctctcctgagttgcatggaaactaataaaaccacgaaggtttctatttgtgctctgcgaacacagacggtaatgaaaccaaagcagccatctccaggggtgatgctatttaaatgccaggcagggcttgaaaatgattttaatggtggaaacagaaaccagctagtgagatgttgcttctcattctccccagtgtctgctcacctgtgtcttctcagagagaatatgtgcacacatatgtatgtgcacagacacccacctacccatgtacatccacacctcccacacacatgcacacatgcatcacacacgatccacatagatagaatttatttgcagtatgttaggtggatcctactttgctatggaagtactttaccatggcactgtgtccctagactgaaccaatttgtttatagcaaggccttccactggctcatatactatgtcatttgcttttgagcccagcagttagttctggaacattcttttgtaccctttcctgtttattctcaggtatccatcagtctccagatttatcactgtttttgttctgggaagttcttctgtgtgaactggaaatactgatgtctttcagaaaacaataacaagtttcttctgagtatccatgaggcataaacagtgttggaggtctcatatggtaattaggttatttgatcctcaaagtaatcctttaatatagacatttaaaattattttataaagttttaaaggttagagaataagcatgaggaataaaatcaaacttctcccacccctataggaagctttgtgtgtttactggtgttggggtactaagcactttatatgcaaatatttggattgaaccatccattgcggtaggtagtactatcactcttactttatggattagggaattgaggcccaggccatgcattagtgtggcagtagatctgggtatgaacctacacagtattaatgacctctgtaccccatatcccagggcctgttgtatgatgagtcgcttatgagtctagaggaactattgctataggactaaaaggtgtatgagagggtggacggtgttgcttagatggtggagtatttgcctagagtgcacaaagccctgggttcagttccccagttgtagggagctggatgggggcgggggggggggcgggaggtggcatcagaggttcaaggtcatccttggctacaagtcaagttcaaggccaacttaagatacattaggaccctgtatcaacgtttaaacactacacatacatgcccacacatgcacgcacatgcacattaccaccaccaaacaacaacaaggagtagcttgagcctcacacaccatttctccatgaggtgggaagtccttggttaagtgcagagaattccataataccaggattgaaatggatctgaagtgctggtcacatctcttaaattcatgagctgtgttgtcagaaaatggggcatgccccctttctctaccttcaataagtgggtgtactgtatgcagttatgcaggttcacctccagagctggtgtgagacttagatcatataacacatagttgtgtttgacaatctaaggcccacatgccaacccctgtgtcacagggtccatagaagcacaaaataaatatttgggtgagttttgagcatgtgtccttcaattggattaagcataagatacataattcaaacatgtttttaaaaggttgagatagaggttggaagttattaaaattcattctgttcaagcatgagggcctgagtttgagaccccagaacatacatgaacgctaagtatggtcacacttgcctgtaacctcagtgctgggaggcagagataggtggattggccagccagccgaggtggagctatgagattaccctagcaaatgaaaaaaggcagaaaagtaattggggaaaacactcggttgctgatttttgtgggccacctacagacaagtattccacacacatgtgcatatgcataagccatgcatcccaaacacacatacacacacacacacacacacacacacacacacacacacacacagacacacacagacacagacacacacacacacacacacacacacacacacacacacacacacacacacacgagcacggggaagcagtaaagttggatgacacttaccacccaagccttcctgttaagccacagagataacagagctgcagatcctgatgtggaatggtgcccactattctctcatctctgggtgctacctgagtctctctcgaactctgttctttccttctatcccacgggtcttgggacttgaactcacactgatgggcttggtggcaaacgctttacctgctgaggatcctcactggctcctctctttcaaagtctgagactcttggcgatggaagggaagccatgcacgtgaaatagatagatctgagttctttggcttattggaatgacgtcacaggatggggggggggtcaggaaacccctcagtaggtgtgacccccttgctttgaaaggatcaccccctgtcctctggacctctttagcctggaaatacattattgtacctctctctcaatctctttctagatagttgggtgtcatgaccttgtgtattccaaaccctgtgggtagaacatttggaagtgggaaatggattggtcagttagtaaatctttacaaacaggattgtccttttcccagggatgtggggatcatgtgagacctttcttttctggtaatgccgtggtcacattgcatgattgcaggaatcccctacacattgtagttatgagcagtgacccttggagctctgtagtgcccaacctgtatatccatatgcctgtcttagcaagcaactagctgggctggtacaatgaactcacagaagaaatgagaaatgccataaacccctcttaaccattactgtcaaaacgagaaggcagaatgcaaagaacttgcgatccagagaagggggagggaatggatttggtcaaggagggaggggccagatgagcccattggaactgtggagttggggttacccttcaagcctcgtccctcaacaggctgtttctgtgctttctcatcactgtactcatgccctggcacagcaagcgtccctggttttaagcacaagctttgagaacgcctcctgtacacatgtcagccaggtgcgtccctgtggcccacgggcgagggataacaagaccctgaggatttagaagaggctcctctgcagccagctctgctattttcagctgctacctacagcctctgctgtcccaggtgtttgtcagcacagcatcctctgcatgaagcggaagtagctatcagaggccaggactttctcatccaggtcatggctgtccccttcccaggctgggtagttgatggtctcagaggctggcaggctgtagccaagcttctctgggttgggtgaaatgggcaggtggagacagagaaaagatcgttgccattgatgcctcttttcagccctgaggtgttgggcagctcttcatccagcagtggcttatcaataatcgctctggaactgctggctgtggcttcaaggtgctgcagatctgagctatatccctgttgccgggagacctggtgatagcatagcagagcatagttcaggaaggtccaggtgcagtagagggtagaggaggccttgcatggccttaggtggcccaagtcttcccctccaacctcccactttcttacccagtgcagattagttcaactgattaggaggatacctcccagggggccatcctccctctcttcagccagcctttcttttcttccttggcctgcatgggcatctgctgcagcaggcatctctactcccatgtggagtgctccctgtggatagaactgctacattttctctttggctctatgcctggctggtggtcctgaagggtactggtgcctctaggtgttggtagataatatcatgacttggtcttcacagaaaccatgggtgaacctcagcttgcccagctcctgttatttatgtgttggccttgttgcttttgcatcaaggctagctgggaagtgctctgaactagtggaatcaggcagaagggacttgatgtaacttcctgggttcagtagcaggacaccttgatatttccgtttgtctcttgggacacttgctgtctggaaattagtggccttgtgcagggtatctgactgctttgaaaccactatgtgtaagtccaaagtcccaggagaggtcctggaggaagggatactatatgagcagaaaggagacaggaaaaagacagaggaagtgcagtgagtatgggggagggggtagggaatgagtatgtgtgtactagacgcacatgaagacaccatcttggaactggatactttaagtcccacttacgcaaatcagagacaaattattcagttgattgctccatgcattcctgctttcagaataagaccaagaacagaatgaaatgattgggtttaagccactacttatatatcggggtggtttgtctgcaacagctgactggaataggtagtagttgctagaggctttccttaagactcagcttttgttctgccgcacagtgctctttactttgcttcatgatactcccctgtggagacctgatggctgaccaacatgcgaacatggtggtctgtcttgcagttagacaaatgtgagcttaaagcccactcctacactgcttgggggtattgagtcttatgagtaggcaacatggctactggaccactctgctggttctaggctgatggtctttccatggcattccttgagttgctgcttgcttcctcttcttacccagttgcttattatagtatctggtctgtgattgtgctgtggtcatgaaaacactgaactagctgcaagtatagtcaggctaggacagctgctgtaacagacagccccatcagtccagtgatatagggaacctctgctcgcacccagaatgcaaagaggcttcattctgagcctgggcctcttaaatttagaacatgtgaacatggtggtctgtcttgcagttagacaaatatgagcttaaaacccactcctaccctgcttgggggcgttgactaatatccacttcaatctccatacataaactggactccaaaaataccagctcatggaggttttgaggagatttagaaagcatttagcatcttgtaagcattgaacaaatggctgtgagtttaggtcagcagttctcgatctgtgggtcacgagccctcttgggaggttgcatatcagatgtcctgcgtatcagatatttacatcacagttacatcagtatcatcaaataattttgtggcttggggtccccacagcctaaggaactgtatgtattaaagggtcacaaggctaggaaggaaggctagcgggaaacttggcatctaaaggccagcaggaaggtgggcactgttctctgggcattaagagtagagccagagcttagggcaaaaggaaaatggagatgcctctttccctgaccctacactcgctaccactctaggaagaggaaggagggactgtagggagaggagaggaaaaagttgagactacaaaacacctcctccctttagggcaggggcccagcttagttggcagaatcctagcatgcatgcaaacctgactttagcatccagcatcctataaaccggtgtggtggaatgtgcctataatcccagcacttggaaagcggagatggaattatcaggagttcaaggccggtctgggcgacgtgaaactctgtttcaaagacttcactctagatgggtttattttcgaaagcctcagtttaccgaatgatggctgcatcccacgattctgaagctcccgtgactctacacagcacctgtgttttgtgtgaattttgagtttttcctcccgaatggtctgtccagtgctgccaccttccatgttctcagacagatggagacaactgcaaagggggcagggtggggtggggggggaggctttagagggcagaggcacttctccacaggatagatcttttctaggttccagagtctggacaccagagtaagaagggccacctggccctgtgtgcctcaggagctgtgttcccgtgggttctgaggagaagggaatggggcagaaggacccttgggccatccaggcaaggaagaatcagggagtgccctacttaggaatctctctctgactcacagagctgggtcaggcacctgctgcaaggtttgcatagcacctggtatttgtccttaaactttgcttttttgttggggattatgtgtacggagactcacaaaacttgtttctgtacactgaattcccggaagactttcttccccacctccagctccgtttcatgtcaggttgatgttgccactctctgaattaagcaaatattttgctcctgggtttcttgccccacatttgggccaggttgggaagagggtctcaagagtgttactcacactgccttcggggaagcctgcggtggaggtgaggctgtgtaagacatgaatagggtcttctttttcatctgtgtgctgagctggtaaggaaacataggtaggtacctgggattagttctctctccctctgccagggagctggctggtctttgccagccctccttgaactccctctttctgtagctatagcaggaagaccacagagtttcatgcagcatggaagatgggctcaaaagatggcaataaccgtcaatgtgtatacaggcacaaggtagcacttagctgaagttgacttgaggccacctcctggcaagcactgtgtaggcgaggatgaggcatgtccttgggactccagagcacttcctgtgcttagggatccggctagattgtaagctcctgatgggacccggtgtggactccacactctggactacgggatgcagagccaggcaggatgtgcatctttatttgtctcactgttctcagcactgaacatgtgacatgacacaaatgggtacttaggaggcgccgagtgagtcagagaacagatgcatattctgcaatcactcacagatattccatgttagttacatttctcttctgggtggtgattccccttgttgtcggaggcttcttgagctttcagggcatcggatcccttctggaagtcagagtaccgttgttctagaccaccttcaccagaccacgggctttaagaaggcaagactctctcctgaccttaggcattagcagggagtgtgagtgacctgagggtggaactccaaagctaccttatccccatttactggtagcttggcagaatattctggaagtgtctcaagcttgacttgctcagaagaaaggctgttttatgtgcctttttaaagtgtaggatagctgttcccaccagcagacagccttcagctgtatttgatggaaccacaaatttgttttcttctccaccctattcccaccatgaagagacctctgtccagctagccacccgccatccctgaaagaggccaagttcctccttgcactgtactaagtcgaattgcagctacttggatggagggggtgatgttagcccgaacaaaaacatcctgttggagatgaagccatgctgggctttgttacacaatgggaaataggagagcagaggtgagctgcggagtctgactgataattagcttctctgtgcatacccatgtgccagtctgcagccaagctgcctcctaaggggtgcccccttgcctgcccaaatcagccccaaagcctcagaagtcttcttgcttcattgactgccctgttgtgtctggtttttagaaaagaggattgcttcaaggccagaaaaactcagagttctttaatggagcactgggtgcattgaagagaggtggagagtgtcacagagagcctggaggtatatagagctagcccacttgtaggaagccagagttggtagagctccaacattggccacattgcttctgatgggttaaggggcacccttgaaggataggtgctcagtagctgaggtccatcacctgaggtcataatagcagctacctcagaaggtagaaaatgagccaggacagtgaaaaattcagtcttagtgtgtaagcaagagctccaggccatttgtattttgtttgcacaataaacaattattgaatccccattgtctgtttatgtgcagtgttggggtagaaggtaaggagtttccagaaatgagtcagaaccaacaactttgtcttccaaggagtaaatggcctagaagggccccttgctgttgggagggttactgagagccgtgctcaaggtcattcttggctgtaaagaaatgatacccctatttgaaactggaaacatgggtaagatgttattttttttttgttgttttgtttttttttgcaatggaagccttttgttcatacagggtacctaaccccagacctcaggtacacaggctgagaaggttacctctatgagtacacaggcagcactgggctttggaggtgaggagtctggcttatattctgtattcaggtagaaggactgggtggccatgtgaggactgtgaagggaggcagtggagtcatgaacatttctcaaagctgctttccacaagggaaaggaagatgaatattcatgggtctttgacttgtcttttgctttccctagctgaagaataactgtttcatgcattcagctcctgcagtgcagggaggggagtgggaagaaagcagagaagatggtagattctgtgagcagctgaacgacatggtacccatggccttgaagaactgtgtttgagcctctggtcatgttcatgaactatgtacttcctttgaaatttgtgggagcttggcttggtggctgacctttgtttgctatctgctatttattgtagggaggatattttggcttggcttagctagggtgtgagcagcggagccaggagataccaggaaggtggtgggattctcatctcttgaaccctttaccttttgtggccgtagttcttaaaccaagtcagtaggatagcacttgctttactgtgttgtggtctttgaatgtatctggcgtcttcaaggacctactcccttctgttcctccagcttgctttccttatacttctggaagccagcttgttgttgtagctccagcaggcaattcaatgctcaatgcaaacttgactggaaaatacttttgtcccagcattcctggttcaggatctgaggactgttctaattgggttgtctgagaccagggctcacatactgtcctatctcttcagaactttaaggaccccagatggaaagaaggatatataagtgggaaagtaaaaggtgggagcagttgaaccccttatacgtggaggagatttgtaaaccctgtagtgaagaacagctgggaatggggtgactggcctctttatttatacttcacctttaacttgtatcctctttggttgtgtgtgtgtgtgtgtgtatgtatgtatgtatgtgtgtgtgtgtgtgtgtgtgtgtgtgtgtgtgtgagagagagagagagagagagagagagagagagagagagaagtacagtatgtttatctaaaaggatgtggtggctctgtggggctttatcttttgtctgtggttagttttgaattaactcaggttggagtgttgtgctttttttttttttttttttttttttttttttttccttttgagacagggtttctctgtgtagccctggttgtcctgaaacttgctctgtagatcaggctggccttgaacccagagatctggcatgtgctgccactgccctgagagaaaaatttctttttaaaggacaattcgattgttcacatttgtgttctttctcttagatattggttatgttggctaaatctttagggactatagcttaatataaatagcatcttgcttaatttttattttgaaaaattggttttaaaacttttaagttggcagagctgggtctgagatgactcagtggataaaacacttgctgcacaaacaagaagaccagcgcttgaattcccagaatccatataaaagcttgtgggtgtagtggcccacctattatcccagtagtgggaggtggagtgagtggatcctcggggcaagcaggctaagcagattacctaggagagatcctgtctcagtagctaaggagacaagtggtccaggacaatgcctaacatcaacctctggctgttgtcaccccacacataagcaagcatgaatatatgcacaccagacacacgacacatgcaagacaaatgaaagtgacagataactgtaaatgtctgtcatgtgtagcatgattgttgtgtgccaaaaatgtctatttaccccagataggacactgacaatgagccaaatgaacactccacccaaggctagctcagtgaaccaacaaatttgctggggtacttacaggaccacaggtgaggagctatttccaggagcacacatgcctcagaggcagctgtatcactgaaaagcctatcccagcgtggggtgtcactctgcatccctggatgcagaacatctccctgcagaagttgcaaggtgcccaggcttgtggaagagaggcagagaagaaaacatgactgtgagctatggagaggtagagcagcacctgttggtcatcagttggccttcattggctagagccatacagatactgtgaaatgtttcccaggcgactgggtaccactttcctttccctgctgtgaccagtggccataggcatcagtaccttaacacagtgtgattgccggggcatggtgttgtatacaagaaatccagccactcaagaagctgaggcaagaggattgcaagttcaaggctagcctgggtgattaatgagacccgtttcaaaataaaaataaagagctgagagagtagtctggtcaagtactttacatggcttgtctaagaccctcggttcccttcagtaaagaaaagagaatatttcccattcctacagttcaagaggtcagagttttaagtgggttccactggtccaaggtcaaggtatctgaagggaggatctccttaccttgtgtcttcttgtctccatgcctctttctcttacctttgaatcacatggctcaagtctccacgtccatcctagcttctcccacttcctcgtctaggccagatctataactacaggtagagtcccctgcgcaaccagactgatctcaaatcaagatcactgggacatatcaaacagtatcttgtgccatgtaaggcaacagtcataggtctggactgtgttaatgggcctttctgttgaggtaacaacatatggaactcacacaacttaaaagaggaaaaacttatattgactcatggttgtaagggtgtcaggtcatcatggtggagcctcgtggccaggaaagggaagagaaatgagaactaatgtgaagggacctgtgtaatccagcttcctcctgtttcacccttctattccctggggactcccagcttgttggaaggtgctagctccatccataggtgcactcactaagcttctgtgtatcactcagcacaataaagttgataatcaggattaatttagattaggaagtgggctttagcggaaccagggtccagtacactcctgggtatacatgaatgtccttgtgaagatacagagcgggtgaaggaatcaggaagccagttccatggtacagcccaccaccctccagagtcgcttctcttcacacactcacacccagcgggcctagcaggcttcttcagggtctgcctagcttttcacccatacccctttccaacgtggctctcattcctcaccccatggttgtcctttttgccattttgtcagttctagcagataaactctactaagtaatttgacaaaggtcacctaacagctgcattacccactgagctggttaggtgagtctgacctgtggtgcttcctgggactgaatggaacccaccaaactatggctctgaggatctgtgaatatcacttttctcagaggcttttgccactgatcgggtgtcacagaggacagttgtcaagagtaggctgtttaacataaaccccagataggtcttcctgcttccaacaagaagggctctgtgttatccaaggagacccagaggtggggcaatactgtgctttctgtcactataacaaatacatgagataatcagcgtacaaagggaaggtttatcttggctcgtgatcattgaggtttctgtttgtggtcaattggctccattgttttgagcctgtgttgggtacacggtggcaggaacttttggttagtaaaactcatctcatcacatccagggagtaaacaggagtgaggaggtttgtgggtcctctgatcttcttcaaagataccctctaatgactaaagatctacaggattccaccttttaaagacactattcgttccggatagtatcactctgagattcaagcttctatcttgtggacctttggaggacactcatgatccaaactctactatactaattatccttggaggcgggtcactgtggatgcaaacttgtctttttagggtgcatcgggtaccttctaagggtaggtgaggttgctgctgtaggcctgggtctttctctggagaacgtacttgtatatcacttctctatctctgtcttgtaaagaagtgtgatggaattctggtgggcctggatgacccccatgcttgaagtcgacctggcctttcaacacctatgaagagacctagggagagagggccagggccattagtgatctatgctcagagtggaaatactctatagatcattgctgtgatcactgcagagggactggaagatgaaagtgcagcagggtgacagcttatctgtccctcactggggaagaggaatatgggctcaaccccagctcagtggtttatagctgaccgatactgtgaagttctgatgtcttgttttgtgttatgtgcgtgagtacttgccaactttgggcgttatccctcaggtgccatacaacttgtttttgaagacagggtctctcattgacttggggattgcaaattaacccaggctggctagctgtgaagccgagggatctgcctgtctgaatcttcctaacactaagatgacagacacactccaccgtgttctggggattgaacataggtccccctgcttccaaggtaagcaccgtaccaaatgaaccgtcctccagaatctatgaatctcagttccctatagagagcagtctttttttttccttttctttctctctttctttatttttttaatattttttattacatattttcctcaattacatttccaatgctatcccaaaagtcccccataccctccccccaactcccctacccacccactcccattttttggccctggcgttcccctgtattggggcatatacagtttgcgtgtccaatgggcctctctttccagtgatggccgactaagccatcttttgatacatatgcagctagagtcaagagctctggggtactggttagttcataatgttgttccacctatagggttgcagattcctttagctccttgggtactttctctagctcctccattgggggccctgtgatccatccaatagctgactgtgagcatccacttctgtgtttgctaggccctggcatagtctcacaagagacagctacatctgggtcctttcaacaaaatcttgctagtgtatgcaatggtgtcagcgtttggaagctgattatgggatggatctctggatatggcagtctttagatggtccatgctttcgtcacagctccaaactttgtctctgtaactccttccatgggtgtttatcatagcaacatttggtccatgcagtgatgcaagaagggcataagaagtttggaaaccctctctgaaggtgagctgcttccctgcccatcgccacttgcgagccagccccagcatttgtggagcttggtctggagtggagagaaggtctgcagaaagtggaggagaagctggtgcctatttccatacttcagctagagctggagtatgggaggctgctctgggctggcatcctattgagacactgcttggactgtcttagcctcagaaggaggtttaccaggagatctggatgtcctgtgtttggaagatactgggctgaggccagggacgtctctgagtcccattgagtaccctgatgtcccatcctccaacctcctcaggaacctgggggcagagcacagctgggctttagtatcctggcctggatcccagctacttcctagttgtgtggctcctcaggatcttactttcctcatctgtgaatgggaatgaggtccaacctgctgggacacttatagggaataggaaggaattatgaaggggacattttatagcccttcctatcagaaggcatggtgccagttctctcctgttttcctcttggccttcctgagagctgtctcctgtgcctggccagcgttcaataagaaaacccttcttgccaggtggctttggagggcctctcagtcctgtgcccttgggttgtaactgggcagggtctctcagttggggaacagaactgtttccagagttcacagagtggcagacagtgcagcaacctgcggaggtatctgctgctagagcagcagtttatggccatcctggagttcttggcgtcagggctgttttatggggctctgtgttcttggaaccacacccaagatttcccagttcctttataggctgcagtgccataaggtgggcatctgagacacctgccaaatgcgaggtggtggtgaggtgatgatggggagatctggtgccaggtgagaatcaggtggctcaaaggaaagccatgcctttctagtcgcccacttcccatctgctagtcttgaggaagggaacaacttgtctgagctctggcataagttactatcagggtcagagggagagacttcatcagtttttaccatgcctctggattacttttcattatcatttacactgcccaacaaggaaagcctcccatgctactatggagttttgcaagtgatgacctcatgtaggctagtagtgaccagctctaacctacagctgaaaaaatactggttcaaatcctgtcctcactgtctaactgcttttttgtggggaacatatatgtgttcaagtgtgtgtgtgtgtgtgtgtgtgtgtgtgtattgttccttagtaacctttgttttccagacagggcttctcactgacctggagtttactgagtaggctaggctggccaggcagagagccacatagagcagcctgtgtccatttcctctgtgctgggatttcaagcgcacaggacaatgcttggctaattaattaattaattaattaatgatgtggctttaggggactgaatgcaggcttctgtggcaacacctttaccaaaacatcttgccaattccttcaactggttttattgttgttacctagagtccagggtgagtctatgtcttgccatgcaagaagtggctgggtgaattgctagctggccttgtattaaagctgcttttctggacaacatgctattagcagatccccagtaatactaggcagtgatcacatgtctttttggtcttcccataatggccccacaaggttgtgggtctctcattattagtgaaagaactgcatttaagaagcttgtccaaagtcattcatcaagaaagaggcagaggcaggatttgaactcaggaagcccaatcctcagtcaccaagagctgtgtttgtcacttaagtctgtccttgacccagaagaccaccacttactgtcacaacacaagactcttgtgttggggcaagtatggagtcaggacctaaggaaaggactccactgttttgttgtgacttggtctggatgtgaggtcagactctaaagagggtgtggggtatctctttccctttcatccagctcttcacacatgcttagaccctgttctacaggactgctgtccttgtttcacatttgaatcttcatcctctggccacatccacactgtaggatctcagagggaagtctttccagtctcatgactgtatatacatctccaccagaccctttcctagcagtactctttgatggtggaggcaggaagccagaggggaaagaagaagaagaagaagaagaagaagaagaagaagaagaagaagaagaagaagaagaagaagaagaagaagaagaagaagaagaagaagaagaagaagaagaagaaagaagaagaagaggaggaggaggaggaggaggaggaggaggaggaggaggaagaggagagggcccctagcaagtctagcttttcaggagctcctgagaactctgccattgcaaataccattacttgttgctttatttttagcaatatgagggtcccggagggcaacaggggatgtgggaatcctattttttgctccatcttgctaatggaacctctagcagtttttatgcttgatttactttcctctgtagttggccatgcctgcagccctgaagcaactgctcttccccttcgtcaaggaggagcagagtggatgatgttgagcactggccttgtagtctctctctctctctctctctctctctctctctctctctctctctctcttgtctgtctgtctctctctctctctctccctcctggctcgagtttctctgagcaggcagatggcatcattcctggttttctccccttagatctggtaaattctggttgcccaaagcataatcatctccctgctaggatgaatggccattctttggagatattctgggcaaaggcaggttgatgggggggggggatcgctggccccacagtggaggaaatgggatccagtgcagggatgacagtgagaaagtgtggagcaggaaagtatcttctggttgtctatcctcacatcttgccaattataaaaagcagtcactctatagagacattaactatatgctataaagctcatgtagactgtgtagccaccattatccaattgtggaccatgttaatcgtcccccttccccaacaacaatcacttcacattccctcttacctccaaatacagttgccaatcgtcttctagtctaccatttgctttgtgggaacctcatatgaatggtgtcacatgttatgtggcctccttggtgctccaacttatgctataatagtgagccctgtcactgaacataggtgtcagtagcagacaatagagctactaggacctgaaaagctgatgacttcctcaacttggctgttgaactggggtgggaggagcagatatgatatcaggcattggtggttacatgtgcctcacaagttggggtaaagttagaaaattcttcccgtccctcaagagggtaggaaatgtatcaagggtacattgttctcagaacactgtggtgtggggtcattttgatgtcaaactaggttagtatttgaggtggcctggatcttgcagacaaagagacagaggctgcattcttattgcctgtgttgcttagccctcaccattgcttggatcgaatcattagcatcgtctatggcacctgctttggtgctggttcaagtaatttgcttcctctctggtctagtccatatccttgaagaccatggctttgaggtccacatggtttctggttgagtcacagacaaataaacttcgtgggacgaggaggcaccatggtgatgacctccaataatcagatcattgagattaggctgtggcctctcaagtccccgtgactcctcttttggaaccagagaagaaattactttatcctggggctgatgggaataagtagtgcatggatattttggtgcccagatattttaaaaattttattagatattttctttatttacatttcaaatgctatcctgaaagttccctataccctcccccaccctgctccactacctacccactcccacttcttggccctggcattcccctgtactgaggcatataaagtttgatagaccaaggggcctctcttctcaatgagggctgactaggccatcttctgatacatatgcagctagagacacgagttctgggggtactggttagttcatattgttccacctatagggttgcagaccccttcagctccttgggtattttctctagctcctccattgggggccctgtgttccatcttatagatgactgtgatgtgagcatccacttctgtgtttgccaggcactggcatagcctcatacgagacagctataccagggtcccttcagcaaaatcttgctggcatatgcaatagtgtctgcgtttggtggctgattatggtgcccagatttttaaaggagaaaaaaagtccattccaggtgtccccacctaaggtaacgtaccagagtgtgtatgcggaagtcagaggacagcttgcagagaatcggttctctccttacaccgttaggatctcagaaaccaagctcaggtcttcaggcttggtggcaagtgcctttttactagctgtgctgtctcgtcagtctgaatctttgcctttaaatgacacagttagatggtcttcctttttacccagagggctctggaatgcattgagatggtattgggtggctgctgttgctggatgtgagttattggtccagtgtgggacttgggatagaaccttcaatagtgatcttccaaggtatcccagtctcttaaaggtgtgaggctgcactgggctcctgggctcccatttctaatggtgttttggaaggtggagagggctggttgtgaaagccttccctgtcaggcttcactgtgtgtgagggcagggatgaagtctgggctttgctttgcagatgaaaattgcctttgctcagtgggaggcacctttgaccacatcagtctggggagagccattaagcccccattatgtagctgctgctgtagtaagcagattgacaaacagtttgatgtcctgtagcctgagaggccaagagctagagtggagtgggtgtaatgattggggtctgaggtccttgatatcacctgggttctgtcacctactgactccaggaccttgaacaaggctgtttaactctgtgttttgtaagaagctagtgtgtctacaagggcagttttgaggactgaaggagtgtcaggttcttaaggatgctaaatcaggccttgtctgccttcttcccctccccctccccttcctcttctccaccccatctctttccttcttcctcttcctctccctcctattctttttgtttggcctcactgccaccattaaacagctgaggatagtttaggccatctttgtcaactgtaaagatctctttgtggcagcatccaggaggcagtgcccacccctctagaagtaaccaggagtcagagtaaccccttctgctccagagaaaatgatgccatcaattgctttccatggtacaagtccaggctatgaggatgggttgacagtgatctacatctagacttggtgttccaaccacatgcttggtggcctatggagttttaggggatgatgaaagtttaggatggaaagaaacaaggcaaaacagagatttgtgtagtgggagaggaagggtgcatatggaggcctctggtgactaagggaggggtggcagtttgcgctgggttacagggcttgctcagcaggacactgaaagccaacatttggctcatggtatcccattattttctacagctctaccaacccagatgaagggagtctacccatgtgctgatctccctaactgttgaaaacacgaggaatggtattaaagggttgcagcatcaggaaggttgagaacagctgtcatggaggaagagaatacctccttaaggacatgccctcttcccccagtgatctatcttccttctgttcaccacccaatatcacacaaactgggaactgagcctttaacacaaggactttcaggggacaccaggatccaaactgtagcacattccactctaattaagaataaaacagtgcccagtatcacctctcgttcaacaatgaactgtaggtctgaaccagtgcaataagataagagttgagcaggagaggcatacacattggaaaggaagatataagggtgtcttcactggctgctgatctggtcatgtggctggaggaaagcctagactccaaatctataaattattagaagcaaatggagttcagccaggtagccaaaggtcgaatgccagatgcatggcttcctaagagactgaggctttgtgtagagtaggatctggtcattatctaattgggtggcatccaggctatgcttcctgacttgcattggtatggtgggacaaagtgctgtctcactcatatccacccacctggcaatacagatcatgtagtgtgcgcgcgtgcccacatttgcccacacatgcactgtggagatcacaggttgatgttagatgtcttcatcagtggctttccaccttatttttgtgccagggtctcttagtaaagctggaattttagctagcccaggtgggcaatgggtcccaggacctgcttatcctccttcaccccacagctgaaggtacagttatgtgctaatgcgttttgctttttcctgagctgcggaacatttgagctcaggtcctcacgattgtgtaggcaagcattttaccgactaagccatctccagagtctgtttaattcacttaattgtttatttagtttttgagatagtgtctcactatttagccttgcctggcctggaacttactatgttgaccaggccagcatggattttgttgctttgtctgtctccaacccctggatattggaattacaggtgcatgacataaggcctagaagagacagttttagttttacagaggaaggacctgtgttctacagtggttacagtgaccttgcccaaggtcagttggtaaagaggcacagctgtggcccttctgtctactctctctcccagccctttgcagacctgacaggttctagcagagtcttgtcctacccgttctttgggctccatttccaggactaatcaagatggtaggaggatagtctaggcgcatttcttttagaactgacatattctctgagatttcttttgggaacacagcagccagactctgctgttaaagtgggctgcgtctcatgctgagaagctaggcctacttttctctgaaaacactgggcttgaggtgctgaggtctgagctcttcattcgtcagcccatgttcctcctctgcctcttcttactcctgtttatactttgctttctcatgcctcctgtacagtcagggaagttggtaagccataatattaatacgttgtagccttatttcatctttggtggctcctggaggccatatccctccttccctaaggggaccctctgttagagtcttccattcatttcctcaggcttgagatagttctgccggcttgccattcagccagcgagagtcgttgaatgccacccgctctgtgctaggtgctggggattctgtagagagtaagataggcacaggtcccttcccttacagtgctgacagtccggagggcaaaagcagcattcagcagagggtctaacatgctagtgagtgctttagagaaaaaccaaggaggagaagacacccttattttctttacatgtatgtatgtatgtacgtatgtatgtatgtatgtatgtatgtatttaactactgtgtgtgtatgtgtgtgtttaagggggaggtcacaaagtgtgtgctgtgagtgtgtagaggtcagagaacaatatgaatttctttccttctactacctgggttctaggatcttcctcagacttgaaggccaaatgctgagccatcttactccctcttttaatttgagttgggcatttaagggtgggaatccccgaggtaggttcttatggagacaaaaggacaggcagagggaaagccacacagatctctgggaaaggagtcttggggtcagtgccaaggtcaggaggcaggatgatatctggtcaagactggtcccctggagcagaatcaagaaagcagagacaaggacagatgagaaaaaacagtaggaatgaaggcttagaggaggagggattggaggagggcaatcgtgtttcttatttaattgtactgggctctctattcctcccaacaaccacagaatcttcacggggcaagagcaccagccctcactcccctttcagtggactctcagtggttggttgcagggtggcctccgtttcccacaaaggcaatgctgggacctgaacagcctgctggtacgtgccttcccacctggtaccttcttttggagaggcacttctaagttgaaaggtgggtgtttcttctaattctaacagatactgcaaaatttctcccttgaaaggttgctgctgaattggggatcaacttctgtttgtgagctcagctgcctgcctctgcttctagattgctaactagccagtctgtgctgagggatgttctgagggacggctcagaatccttcatctgcgggaaggtgtgtgtggtctttcgaagcatgctgctggggatgacatggcttgttcatttttggagcttgtatttactgactgtgacgtcaggacagtgaggaagagggaaacacagctgttgccgtgttgtctgcattacggctaatgttccatgtgcttaaaataagcacagcagtgaggaagttcatggagacacattcgcaccttgtcagatactgaatcatgttcctggagtgtcttcagggtaaggctgccttgcagcatcctgactggagggcctgtgaatgctgagcgcctgctgactccttccccacccctgggtgttgcagaaccagctcttgtagacttttcatctgtttgatgtcctcctgtggctgttttccatctgttgcagttcaaacaatgattaatcttgcacatgagtcctttcgcacatgcaccaggttacgtgttgggtcaatttctaggagatgagtagactaaactgaaagtgattttctggttatatgctgatagacatgactaaattgaccttcagagaggtgtccctattggcagctggtacaaatgattatcatctccctacactacataaaacttgggaggccgtccatcattataatgtttgtcaatctgataagtgagatgcctgctgtgtgtcatttcattttgcattggttctgtatgtccttttccaatgtcccaagcaatataggggctgagggtatacctcagtggtcgaatgcttgttgagcatgcatgaagccttgggttctacccttatattccccaaataacaacaacaaaacattttaaaatctgtttctgttttctagtgtgagctgccaagtctttgttatcccccccctccccccccgttaatgttctctttctgactccttgaagaatggcttgctaatgttagaggggtattcgacagtgtgatcatgaacgctggcttgtctgacaagaagtcagtagctaggagtgaaagtctggttgtttgagaaaatgagacctggtaaactgtaggtctgaagtatgcttctgtatagtgtagactaatcatcagagaggctaaaagcagacagagtagggaactgttggcctctggatccatgtacctgggtttgtctttcacagagtctcattttttatgcctttaccggcttgaggaagtgtgaggaagcctgactgttttctatgaaaatccttttcttgtttgattggattcataattacactttgttttctggcaaccactcctgttgagttaatgggttaggccaggtgacacaatggctttagtgaatgatccttaacttcaggaacaaaacatgataagagagtggatgccaccttcttaacaccatttattcttactagagtagatgctcctggcggggcattcttcaagcatctagtggaggatgcaggctcctgctgtccggagatctgccctgtctaggtctctagtacacttagggtccttgtctgtaggaaggaaaagagagaggtggtctctctctctctctctctctctctctctctgtgtgtgtgtgtgtgtatgtgtgtgtgtacagtcatagctccatagcccccaggccaggaccatgatccacctgccagaggagtggagtccactgttgtgtctggccatcagtcttgaccccaggcacacagtctgccctggtgttttagtgtctatgtggcacttagaaattttttagtgtctcttccagtatggttgcactatgccctcacagttctgcacagaggtaacataagtgctttcaactctatttggaaccctggagacagatgtctgggagacacttatcctatgggaagctcgatgcttaactacccacaccagcttagtggccaagcattctcactgactggccttttctggtatgacagtcagtggccatccactttaggtctgcctggacagacaggctctgttgatggtgagtgagggagaactgggctgcctacggatgggaaactgtaggctggctggagcatatttcctatccttgagggagacaagagtggaactagtctcgtgtcctttacaaagagcagccaaatggtggaaggtgacagagttactactggtgggaaggcttggccaacttgtcctatcacggtgtgacagaacagcttgaaacctggcatctttgtggggagctggtcccctcatccatacttggtcatccttcttttcttgtcatttatgtggggtactagcactgaaatcggggcttttccttcacactcttgtttctctttattttgttattttttgagacatctcatgctgcaagagttcagctgtggtgtctcatcggttctattttgagccacagggaagcaaatttagggtgttttcatctcttctctgaggggatggtgctcccaggggtccactggatggacagtgtgagacagcttaggcactctttggatgcctacctttctgatgaaggagcacacttcttgttttccctgtgtgaattagcctggccaaatcctgtcaagacagagcgatggatggtatcatgagtgttatgggctattatgatagcaagatggcaccaggcatgtcatgacccatgttctggggctaaatagtggcactggtaatcaaatgtctgtccaacttagctttctttttgtacaagagaaatgacatagttcccgctgctctcacaggatgcttatgaagattacatgagataatgtgtataaaagtgcagtataaatggaaattcaattcaaggtattattatattaatagtaatgattgtcatctgtgatcccaatgactcacttggggtgggagtccttggagcttgtcatggccactgttacctttcagctacaattaccatgcgcaatttcatttgacatactcctcatcatatgatgccagaatgggaatgggtcttggggtgaacgaattgtagcctgttgctttatagatggggagctgctacccagcagagggagattggttaaggcctttagacaaggtttgaggctgtcagctctcagtagtgggctgttttgttttcagattacattgtcctatctttactaaaggtctagaaattgaaaactttgggtagaatgtttatcctttgtcacttgatggagttgcagcctgactcatgaggttctggagaaaggtgtggattgtgcccaggagagaagctcagatgctgagaatactgggccataggatctaaaagagataaaagaaggaacgtgagggatttctggaaagaagagacctaggttggttccaaacaaagaaggaggaaatgctttgctcctgaccttgctagactcctgtcttcttcatatattatctctgtcttttctagaggctccatacacatgtgacacagcttagcactgtggggttccatacaaagagagcactgatgagaacccagcattagttcagaatccagcgaaactggcttggcctcattttctaagtctttggttaacacctctgtagagagaacatcttgcatattctatgaatgtgcctatcaattaaaaagccaatggcctatgacttaggcagaaaatagaagatggaacatccaggagcagaaagaattctggcatagagccaggcacaggaagacttgcctggaaagatgtgagaagacatatgcctggtacctgagcacaggtaaccagccacatggcagaatgtagattaaaataaatgggttatcttaagttatgattctaggtagagaagagcctagctatatgatctaggtatttgtaaatacattttgagtctgagtcttatttctgggcacaggggtctgggaggatgaaccagacttaacttttacacacctctcctggctcaaggtcttgctcatatgctagatgaggcatccccctgcttaaagacacaatttgtaacagctctttctccttgattactgcttccttcagtggattcatcatctagaattttatcccccaaagttaccaattttagtacagacatctggtataccctttggccagctttccttaaagttcatatcttatgcaactgtggagcctgacagtgctggaaccaaggatttcacattggtgttaaattgttcaccaaagccagagttctgttgtctgtagcttcctcacaaatgcctttcccaggatccattccaggaccccatgcaacatccacctgccatgtctcccgagcctcctcccacccattttttttttcttttttcatgactttgacatttgccaagaatattgcttagcttgtttcatagaatgcccctgggtgtgtctcttaacttttattcagttggtataatttaattggcataaattggtataatttaattttattttcagttggtatagaaaataatggatttcaccatcacattttaatacatgtatggcattgtgttttttgtttttttggtttttttttgctgcatctagttacttcttatagttcatattgtggcttgtcaagagtattggttaggttttttttttttttttttgatagaatgtccttcagtatgggtttgttttatatctttacaaaagtttttactagtgtccaaaaacgagttccataaaaccttttcatacatgtctttctgtgatttactcctgtctagtatctttgtacagttgatgcgtatgaatttaatcatgtctattgggtcttttgctaatgggaatgtcatcaccttcagagtaaggatcttgtctttctggtttgttcatgttcacgaacatctgtgtgcctggcacccacgtcagtcaatatttgctgagtgactgtggaggcagtgaactcctgatgctggtggactgtctgctcaaggaagaagaaaccctggcaaaagccatatgaacaacaagacctctgggaactgctccccctactcttactatgtgtgggcccaagtattgtatttcactacatccggtgtgttggtggagtatgagctcacagtgaccactcgccccagacaagctgaggtatggatatgtacctgagagccaggctaggctatgtacttactccctgggagctggcaacatggagacatgctgagaagcacctgtatccagttgctaatccagacctaggacctcatttagccttcctgaaagcccccagcctgctttggaatggtaagagaatattgttaaaacatagatttctgggacccagtgttcgaatgcatactttgtgtgtactgggggctgagaaattgcattcccagtgacttcccagtgatgctaatgctgttggcccagtggccccgcctaagtacagatacatactctaactgttcagaggaaacaataggttaccaccaatcagcaggatccatgaagtcttcctggaggaagaggttaagcttgagtcgtgtctttggatttcattgctgtgaagagacaccatgaccaaggcaactcttataaaggacaacatttaattgtggctggcatatagtttaagaggttccgtccattatcatcatggcagaaagcatccaggcagacatggtacttcaggaggggactgagagttcaatatcttgctctgaaggcagccagaagattgtcttcccaggtagccaagaggaggctctgaaatcccactctccaaatcccaaaaggagatctagtactcaaagttctatccccacagtgacacacttcctccaacaaggccacacctactaatagtgcccctccccatggctcaagcattcaaatacatgagttgatggggccattcctattcaaaccatcacaagtagggggaaatggactgtagacctgtgtgcagcagcttgctgctgttgtatgacctctgcatgtcttttgtcttctctttccctgatggcatctgccctcacttgaggccttatccaacactcccatactgtgagccacctgagccaggagactatgatccacccccccttcctcacccccagaaaaggaggctgactaaggctctgattaaaattgaccttggctggggtcattgaagtcactctgagtcctggatgtatcctttattttttatggcttgctttaacgtgtttatttgcccacgcctggtccctgcccattggctctgatagaggtggtgctgttgggctctctgactagttctgtttccatggctggcaccagcactatggggcagatgaggcgtgtggccacgcttgcttctctaaaggtgaacatttgagtttcactagtgccctgtatggaaaccgatggatccatttcaggatacagaagctccatggaggctggagaaaatatttacaaggataagtccttaagtgatggtgatgcttgcatgtgagggtgtttaacttcccatcagacgggaagagagagaggcgtaattaggggaaagcagcatctggaagcactagagccacattgttctattggaagattctggggcagaagatgatatgtcatccaaatcacaggatgactggtcccctactgagactttcttctccactgttttctatactctattaaccccaatggaccctacttatgatttgccttgatggatcgatatgaatgcctgtttcaccttaaatgaataacacttaacagctacttgtaaggactcaaatactgtagtattttatgttaatttcaaatcctccagactccttattaaaaatttaggggtccagattccagactcaggatgatgagacttctctttattttttaaaaaattttaaagcatattcctaaaatgcaattctgatcagagtttgatgagtactaacttaagagtgctcacagcattacttttctttccaatcggactatttgttgtgtctccagataaactctaaacattttgcacaggtagatcttccttctttataaagtagcgcatctgtacgcacataagggcaacacagggtgattaatattgtatgtagtgggaacctagaaagtgcttgttgaaggacacatgttaggaagtctctgtaaaaccaggacttattagtgaggctggtccgatgattgccttccatcaattgtactaaacaggtactcactgctgatcgcccaggagcctagagcccaggcacagagagtccacttgctgagattcccaaaccagcagaccctggcatgctggcgctgttctcactactttgatctgtaagcttatgaaacaaacttctccctctctccgccccaggctggttctaagcacacaaagccatagaagtgcatgctgcagaacagagtgtgtttggaccattcagacatagtagcgtggttagctacttgtctacgtggtagcttgtgtaatgacttttgtttcctcgcttaaaatttgcagcgaagagtacatatgtttcatgtctatctaagagtcacacctcctgtttacacaggcctgttctgggagacctcagaggcttctcgctcgctgcggagtgttatggcgcaaccttggcattgagtctctaagcaaaagaggctgcttgaacctcacgtggcagagggcagcagtccagaaaacacaagctcaaatggtactctgtttggaaacatcatgcaaggttgtttagaacgtgccatgtcgtcattttattaagcagggggaagacagaataataaaagcagatggaataaaaacagagttaggagtcaaaagtgtaggctaatataaggaatactgtctcctttcttcaacaatccagccatccaaatagaggcacgtgcttgcactttggccagttaaattcccgtgacaggtacatgaaagttttaatctgctgtttcatgcgcgttgttgggtatggggagaacattgcagatactggagctcactttcctccacccctgtgattccactgcattaatattatgtttaattaatctaatttattatattgacttttttgcttaacttaaaaaatgagatggattattagcttcttaataaacaataatagtcaacagctactagtaaggactcaaatcatttaattcatcatcatatctctattttgttgatgaggtgggacagaaattgttacttatcagaagttggacttcttgaccttcctgtaaatgggatggcagagtgtggtccatgctggatccaggatatctttcaagtagagcatcagaggaggctgtccaacatgcagcaatagcctgcagctttgctgtgtctagtctgtgatccttggatccgtgggtgtgctgagagctcagtagagtgaccatgtgaacctgtgtggggattgaaggccacacagtcccactgtgatgactgtgcaatgtaatgattttccattagatccagatggagagcactgtgtgctgacttcagctgggtgagcactgggcccctgttaaatggagaagctagaaaatgtgtgttgagaagcatgctgcttggctttcacagtgccacacatgtccaccttcagattgacttctgaccttgaaaaccttgaggttcctgaaggccattctgagatatgtgctatgagaagtgagttttaggggggctttggagtatgtctttgcaggaacatcattgccaggcactaatcattctctcacttggcactgaggaaagcaagcaagcatgagacctggccactgacttgcagtgtggtggggcatgtaatacacctgcgcagaaggctgcagaaagaggagtataggcccaggttcctgaatgccaaaaccaaccacccaatctacctatcctcaaacactacaggaaagcagtcctgggtgagccaaatccaggagcctgtaattctccttagaggatagctgcgctcagcctggaaatgtgtgtggacatagttttacaaacagcgatggacgaggggatggaaacagaacatgctgggtaccgtgaagaacacaggcaagtcaggttaatgcacatcttaaaaagttaaataattatatcattaactccatgacaattctacccagtgagttatgattatacccacacctccccaactcccgcccccaattcctcctccacctcccatccaatgtcatgtcttcccacctttaaaagagaatgaaaacagaaacgaaaacacacaaaccaaacacacacacacacacacacacacacacacacacacacacacacacacacaaaccaatcagttgagtttactttgtcatggctgactactctggggtgtggggcctgcctggagtgtgactgaaattccaggtctcactccagtgaagaaagctaacattccctgtcccatcagcaatcagatgacactgtcttctctgcaaggcaccacatcactcccacctgtcttcctccatgctgggacttttgtctggcttgagtttgtgcagcttttgtggtgagagaggatcatcagggctcacagacgcaagctcttattcgcaggttcgatggctggcacaggtcactgggattagagaggtgggtggtgagacccactctgcctttgatccagctaccgacacacactgagcgttgctattgactgacatcatttttcttaccctaggtcgtttgcttccaaggttacacacaagtcttttctttaaatattttttatgaggtattatcttcatttacatttcaaatgctatccccaaagtcccccataccctccccccacacttccctacccacccactcccacttcttggccttggtgttcccctgtactgaggcatataaagtttgcaagaccaaggggcctcttttcccaatgatgaccgactaggccatcttctgctacatatgcagctagagacacaagctctgggggtactggttagttcatactccttgggtttttataagtgagctaagcaattgaagaaaccaacagatatttacgaaatgaggttcttggtgaagcatgataaagcatgacattaaatcagaacatggagacttctcagcctactccatagatccagcctccggcattaaaacctgtgtgttagaaaagaaacgcctatttgatctacatagggtcacgttcctatcaggaaatcatgtctccctgggtggagaccattgtctctctgttgagccagcccagaggctggagttagaaggagaataacaggcaaggatggttgcccgtggagtagctccatagccatgagcaatcaaccatacatgtatctccatgtgctgtgccacagtccaaggacattatgcaaagggggacctgggatctttgctttgcttgtcttcccaagtcaagaagttcacaaaccaattttctgcttctggactctggagctggtcaccactgtacttatattagagatcttagaagaggacagcagcctaggatctcatggccaaaatattattataatgtttaaaaattatcttttcttgggataaaacattcctgggttacaacctggacttcactactatctgcctctgaaatagtattccgtgagacatgggactgtccagtgtgtgcctgccaggacctggattccactggccatgcatgcccccatccatctttctgctcaactgaaatagcgagtcattgacctcatttttggtgaacctcagctgcttactgtgggatctgctgaggtgaggtcagaatggagctgcccaggggaagcttagcctgcaagtccatggaatagaagcaaaggtcacagccagggaggagctggaagaatgtgaagtccaagttttgggtggtctcaagacaggccttgctcatgagcttggtggtgcctttggccatgatggttctgagactataagtggtgtaggtcgccaacatgaaactggggtcccgtggtgttgggagactgaagcaggatggttagaaggttctgggacaactttatcttgccagagccaacttcgccctgaacattggcacttgggtttagtggtaggagtgagtgaggagaagcagggcagagtggattgtcttcaggaacatcctagttagggggggtacttgagaggactgaggaagaacagggctgcttgcttgtcccagtaccttccgagggcagtgatttgggggcatagtaaggttgggattacttcctggtttagatacttttattttaagaccctacttggtgcttatagatggtgctgtatattagacaatttctcagctttttttatatacacgcactttttaatgcatcataataatcctataagacaggtattgtctgtcagttataggggaagaaacagatcatgcagaagtcaataaacatattcaaggtaacttagtcaaatcaagactcaaacccaggctgactagctccagggccagtgtcctgggcttgatggtagcaatgacatcattggtgattttgggtgcagactctgctttagccctggtgggtccaaggtacagatacatttcctttgatcttgctggagaaatttccagttttctcagcacttggaaaataggagatatggaacttcagagctatgtcctgagggcatatctcctggtttgtggaatttttaaaagaggttttattctgcagcaggctttcttgtccagagatcagaggtgaagggcagcttgccacagcattggctcctcgttttgctttctctctcatcctggaactcagatactgtttgaagtttctcttgatctgttagggatagaggtgtctacacttagagaggaaggtaggtctggacatgcatctttcagaggccatgccctaagtagcagttctctggagcatctttggactatatggagattatgtgcggaagggcaaactccaagaagaaggcaagcataaggagacaatggaccatgaaggctagattggcccaggacatgccatctttgtcttgcctgggttagaagtatagatttgggtgttgtattagtcagggttctctagagtcacagaacttatggatagtttctatatagtaaaggaatttattgatgacttacagtctgcagcccaattcccaacaatggttcagtagtagctgtgaatggaagtccaaggatctagcagttactcagtctcacacggcaagcaggcgaaggagcaagagccagcctcccttcttccaatgtccttatattgtctccagcagaagctgtagcccagattaaaggtgtgttccaccacacctttaatcccagatgaaaggtgtagcccaaattaaaggtgtgttctatcacctttaatcccggatgaccttgaactcagagatttaatcttctggaatccatagccactatgcctcaagatctccataccaagatccagatcagaaacttctatctccaagcctccagataagggtcactggtgggccttccaattctggattgtagttcattccaaatatagtcaagttgacaaccaggaatagccactacaggtgtcaaatagattctgctatctgacctggcattgccttttagaaggatggaatcaagtaggcccttgaatgtaattgctaatggtgtcatggcttgcaaccaggtactggtatctcgttgcttgggttaactccaatagtactgctgatgagcccagaccaagaacctcttgttgctctctgtaacaaaggatcttgttataataccatagagttttacggttagtctttctcccattcttcaccagagggaactatggccttttactgtggtaactgtatactggggtggcgggtaatgaaagtcagactttttggagtctagtggatactggttctgaattgaagctgtttcaggagactctaagaagcaccgtagcccttcagttaaagtagggacctgtggacgtcaggtgatcaacagagttttggctaaggtctgactcaccgttgttctagtgagttcccagactcagtctgtggttattcctccagtccccaaatgtagaatacttagaagtcagcagaatccatgtgtaatccaaattgcttttctttgagtggagtttgtgggggtcacagcagagtccaaacaggggaccctgggtcaagattcattaagaactatgatgatagccaaagaatactgaatcaaacatgggacttgtatggtgacatgggttgtaccttaagtctcaggaaagccacagtaattgtccagctgcagggtcaggtctaagctttgtcctgtgttcttggttgtttgggatttgggactttctcttcttttgccaaggatagatgcctcgtctgagggagcaaggggcatctcaccaggcccagtccgtactgttcagagacatctgccttcctgggctctgaaagggagctcaggataggctaaacctgccctgcacttactaatctgcagattcggagaagagctagtagagaaaaagtcagctaagcaatatagatggcactgtacaggtcacactgtttgtgctgaagtttttcttgtgaaaagttgatccaggtgtgtggggcgaaggaaaatgatttgtgctgattcactttgccagcaccgaagggctgttatccaactgcgagcttggcatgcgtgttcattttaaatttaccactcatgggagatggtggcttatgattttggcaaaaatggttctgggatacctgctctcaactcacttctgtagtaggagataaaaaccactgcactggggatatctctaggttttatttcctttgctggaatctttccctttacttaggtaaatcattgtaaaatcctccagggagtgataggtggggatgggggtgggtcagggtgggggctggcagaggtagactgactgcctctctctctgtggcccatgagctaagaatggtttatagatcttgaaatggttggggaaagccaaaagaagaaatactattttttgacacatgaacatgagaaattacaatttctgtgtctataaataaagatttattggaacgtggccacacatattcaattttatatcttcatggctgcttttgcaccacagtggcagagttgggtaatcagaagacgtcattatggaaaagttttctgacaccttggctgtgggataacattgtggctccttggcctggcttctgaggccttctgtccctggcactggcctctcttcagccctacctggcttctgtgactctgcaagttccccagggctactagaagctatgaggtccttgggctagcctgccctcttctctgttttttttcttcaacctcttcctgccttggctaaacaccagtgagttatccctgaagcaagctcctccctcttgcccttccctctctttgattaagtggctctcaatccgggtgaagaaaaatagggagacccttagagactctgaaagcttgaaacttggtttggagggagaaggcctggaggctgagatggctcacgtagtcaacagttgggaaccagtgcccggcccctgtcaggtgttctagagatgaggctcagccctggcctctgtgtctagttcacatttcagtggggggagaggcagtgtgcaccagtattagcatcaggccggcacacaagaagtgatgggggagtgccatctagatatccacagaggtcaatgaggtgaccctgagccccagtgaactagggctctgggttggccagaactctcggagagaggggcaaggtgtagcacctatatgtttctgcttccgttttttatggagatggctggagggtggcctgtctttactgctggagcccagggtatcctctagtctgtccttgcttgtctgtggtcaggctgttcatttcctcaacccttctctggatccttttgatctttcatccccatccacaggatttactctgaggtccaaagtttattttttattttttcaacttttgaattgtttttaatctttaaaaattattattctttctcagttccatatgtatgtgcatatatatatatgcatatatattaatgtgtccatttttacctctcccatcacccccttttattcctttttctcttttactgaaagtctccctaacaagctttacctcctttaatatctttctatgtgacccactgcatttactaacaattctggttgttctcatgatcaagggtgggggttatttactatagtttgggtaacttatcgacaacatcactaaactgttcttttccccagaaactgttcataggctctgagggagggatggggccccccaaatcccttccctgtgcatgatgggattttgacagtcccaatcttctgcaggttaccataggtgcagtgagttcctgagtctaacagccatgtcacatctagaagatacctttccagagctgcctatcccagctcttacatcttctccttcctgctcttcctcaatgttctctgggactcaaggtggggtgttgatatagatgtctcgtttagggcccagaactcaatagtcacttggtcttagtacattgaccagttgtaggtctctgaattaacagctgctcattacagacagaacctgtactagtgaagactgagagcagcactgatctatagatatgaacatagggagtcagagaactctgataacatgtccattgaggaaaacccactatgggctctctcttaggacatccccagccacagagtttgacaaggttttacagtatcaggtttaagcgccctcctattgaataagccttaagtccaaacaggaaatcgttggttgtctctgttaatgatagtcataccactgttgtaagactgggcatatcttaccaagtaggtaattttgaagcatgtgaggttcaaccaacaaagctggttaggaccactgatacattttttacccttagcactatatatagtacctccttcttggcaccattaaggtggtccagcagggaggaagcttacagcttgattttctctttgtatggtttactcagtggaaggtccttaccatcccattctggtgggcagccccacttttctggagacttccctgaagtccatggtatatctttgctacaggtgttcagttgtaccatctcaagctgctgacctctctaacccactcacttagtgtagctctagtcctgagggaggcttgctgctaggtgaccatgctgtcggtaactcaggtgtaccccccacctccttcgcagtgagcatttaccaatagacccacctaccaaggattcaccatgggaccgcatagtttatatgtattatttaagtatgatttgaaatgtctgaaatgttaagaataatgaaacttggttgttaactatcacatggagctgctggcataaggacagcttaagacacacacttccaaggagtttgtcatcttatgccaaaacctggctcttaggatcaatgagatggctcagtggatgaaggcatttgccactgtgtctgatgacctgagattgattcccaaggctcacactgtagaacgagagaaccaactttcccaaggtattttctgatcttcccttgagtactatggcgcatgtattccactccccaaccacagtaaataatacattaaaaatgcttggttcttggaaggacatagaatttacttcctcctagttcccctcagtcctgattacagcaaaaccatatggcaccaagtgtgggttctttaagtcggaatttagtttctattctgcttcagtacatgttgcagggcacatcaactctctaagtcccattcttcctagtggagtaccacagtgctgagcattacaggaggtcccggtgggaccctcagaatcccacatatagtgaatatacagcattgtttttgcccctctttttgtatgacattggtaagtgcagcatctaacctgcagatcgggccagtacctcagggggaagagggttgcataggagtctgtgtctcttttcctttggcatctctcattctggctgttcacctcatcccccactggggcccatggtgccctctcttgcactgccaactgctctctgtctctcttttgggttcagttggggctctgagcagcatggggtgtaaatagcacatgttaggcacttaggaagcatgtcccagttctgttgtgacatagaaggaaggaaagggatggagggcttggtttgctttgtgtggaagaagagagacttagagatgaatgtgtgggtggctttcctgagtgacagacataattattctcctgtggctcatggaggccatgcaatcatggttgcctggacaagacctgctcagagtaacaggctgtgcggagcatgtggacttgggagtcagacactctcgtccagagccttgctactcccagtacagttggaccagtaatagggttcccacccagaacttccggaacctagccagaatattcaccacaaacatagacatgtacatagaagactgaggccagtgcttctggagcctggactctttctccccggtcaaatgagacagggcagtctatgggccccggcttctgattctcaaggttctagttctttccctaggtcagcagcagcagctttgcctgggagcttgttagaaatgaaactctcaagccttacccagtgccatgaactggccctctggagtaggcacagctcacagtcaggagggagagttcttctgcccagctctgctgcacaacaggattacaacagggtcaatgaggtaaatggctggatgcaactcaagagtatcagggagtgtaaggaaaaccgggagtctgaagagcttccccacagtcccagtatgcatccaggaccttaggtgatatcctaagccagttttctaggctgtcagctgggttgacgtattcctatctgccttcctgtgacgtgctggtgccttggagagcatcatctttgagttcactgagacctgaaaaaaagcacggagggacaggtttccttcagcacccaaagagacagctgtgactcctgtttgagggagaccagattatatacccactgtggcctcaagcgaggcacacaatgatgtatcttggtgatccagggatcaagtattttcaagaccactgtgcttaatgtagccaataaccctgctcgaggaaggaaaataccagtgtctagggatctcagcttgtgcctgctttctccttttaccctactctttaccaccaatgggaagttctgaggctcaatttgagttggggcatttgccctgtgccatatcatgctccctttaattaggatgatggagctgttggagggaattggccccctcactctgagtactgggagtggtggcaaagaatgaggtttagaaaaatatttacccaaaagtaatccctctgctattgccactgcctgtttcccgggatgctgggcaacaaacacggagtctggtcatcatttattgagtttatttattaagaccagggcaagagggtaagacaaggtggtgtggtctccaactcaattcctatagcaggcagaggctggggtctcctgggaaaagctatgacatatgacaaccaggaggcatgctgcatgcttgacaccaaatccacctgaacaccagatacaggaagacttcataatcttattttaagtcaggcgtggagttatatgcctgtgactctagtacttagaaggcagaagcagggaactgtgaatctgaagctacataacaaagcccaggactgtctgggctgtatggaatgacttttactcaaaacgaaaacaaaactaaaatctttatgagaaacaggtctgctcttagaatctcaagtgtccagcagcattctaagaacagactcgtgtgattcccagccagtgctgtgggagccagggctcatgctctcccttgttctacatgagcagtgcaggcctgcggggttcgtctctacatcttaccagtgggaaagcagaagcccagagatcagatgcatgagcatcacagggatgagtgtcaggaaagaaatgagcagtcaggccctggtgtcaagcgcataggctgggaaacagggttggctgatatctccccattttgtttttggtctgggatggctctttggcagagggcttaggctatggaatatccaccaaaaactcaactcataggatatgtgtgctgaaatgatggggaggatgtcacttggcatagtaaatctgagagtttttagagtgtatcttatgtaggaaagcatgctgcacattgtgcacctctgtataaatgtgtacatttatatatgcatgcatgcacgtgaaaacatgtacagtggaagtatatactgtgctgcagcttatacacacacattgctctcatggaaacggctcatgaaacaatagctaatcctcacatgacatgatatgcagcttgacgtagcttcttaaagattactgagttataaggcatatacagcaagagccagatgaggagtacagcatgagtctaggacctgagcatgacaatttctcttctagtggagctgtgctgtggaagtactccatgccttcctagcctacctgacatcatcccatccccctccatcttattccatatcatcatcacaccattccatcctctcccatcttcttaaaaatttgcttgcaacccatttattagactctatgattgtgcatgaggccaaggcttgtcttttgcaaacttgcagtgtggtctgaatttctacagtttgtaaaagaggaaggcaacatttggttttacaagccatatctcttagtcaaaaatcttggatagattaccatccctacgcccaccccacccctatgcacagaggcacacacacagaggcacacatacacacacagagagagacacagagagagagagagacacacacagagacacacacaggcacacacacacagaggcacacacacagaggcacacacacaggcacacacacacagagacacacacagagacacacacagagagacacacacaggcacacacacacagaggcacacacacacacagacaacaccccccccacacacacacacctgcaattgttcagtgcccctggccatttctctgtggggttccttgcccacatgttctctccctcctgttatgaataccttgtatactgtggtccctggagctggctgtcctccctctgaatgccatctggcccaggcttctttctcctattggtcactattcatgttttccccttctaagagcctgaacatggcttttgattccaagatccccccagaagtgctgtgctgaaagacacaagtgtgaagtattttgagtgatgaggtgtttgttttgggggttcataccaccctgttctccactctgagatccccaaacactttgagtgtttattgtgcacttacttggtcatttattatctccatggatcagcgtagtctgctgtaccttcatggaagtgccactgttccaccgtggcacagctcaaatctccaagattcacttgattcctcaaatcagaaggaatgacaattctgaagcatgtatagtctgggaagttttggatggatgggggacttttgacttgagtgcattactgatgatggatatatgttctgtgaagtagcagcagacagcagaaagcacggggaccagtttctagaacgttgactctgagggcttttgcgagcacagtttgagtgacaggtatgaagctctttggaaagtcacgattgttacctacctatgtgggctgatgccctttaaatgttctcagctgtaaactctcatcacacagccaatgctgactttctcagaggcccactgtatgctataggggaaaagagctgctttgccacagctgaaaaataactaaagtccacagtggggagaagggtgtcttctgactgtacattagctaccgcccttggtttgtttttcctttcttcatatttccatccttcttaattgggtctgctgactacacacttttttgtctgcacattctgtaactaccattaatctgtgggccctcaaacataatcccgtgcttctgagtcttcctcttccagctttatattttggaagatccgaagtttctgagaacacgggggtcctgagactagagaaaggtgaatttgctccaagttagtcccaagagaaaggctctcatctaaatgtctggaagaaatcagactgagggtgttgtgggctttaagtcaggtgctagctctcccatagaaccagaccccagctctggctggtaggggaggggactgggctggaaatgagatcctttgggggcagaggttgtgtcccaggaaacaggtggtttatttaaaaaatgaggaggaattattatactaatttttaaaaattcatggaagtttgaaggaaaacaaatagaacatcaagatgtgaaaaacatattagcacattgaaattattcccttcagcaaatagtgtatctgtttgctgcttatctttatcataaacattaagataggatttcaatcttaatgaccaaatcttccagaagttttgtgtttctatccttaaatgtgaagtgtttttggtgagggaaaaaaaatctatcagggctcatgccaccttggcccaaattctgaaatccacccaaacattgtgagttcattcatgacttttatgcggtcagcttagtgcgatacatatattcatggacatttcactggttgatcatgtgcattttactctcccagagtcacctgatgaatgccctaaaataaaaagaattgaaattctaaagcatgctagacccatatagagataggtcaaagcctttttctctttctcccttctctctctctcccttccttccttccttccttccttccttccttccttccttccttccttccttccttccttccttcctccctccctccctccctccctccctccctccctccctccctctgtctctctctgtctctctctctctctctctctctctctctctctctctctctctcaagttaaatgtattatagggattgcaaagaaaacagagtttggtcccaagaagacctggtccacatctgtgtgtttcccctccaggctgggtaaccttaggttataatgtaattttgggttctcagttttttccttgcataactggactctatacattttttaggaagagtttgatcgaggtaattattcatctcccttcccctttacagccttgcttttagagtctgaatgaccccacctaactctttctcccctgggaagaacccaggaatttttgttgttgtcgttttgttttttgagacagagtttctctgtgtaacagctccaacagtcctggacctcactccataaaccaggcttggcctcatactcaagagatttatttccctgcctctgctgcccgagtgctgggattaaaggtgggcaccaccatactgggtcaaaccctataattctttatgtaactgaattcactcctcaggccaatgaaggggatattttcatgattgctagtagcagcccctcccccaccccccacccccccaccccaggagttcaagagtcactcacatttatcttgaagccagtggaagagtctggttacaggagggcaggctgtcagccagagagctggccttgggtggccagactttggccacttttcccattccggggaggtgatggatggtggagttgtgatttttaagagggacctgaatgtggttaacatggtgacagatacggatcttaactgggcacagcttgcaaattccaattaatctgatcccaacccttgggaaatctgttctgcattgagcttgaactctggtctagggctcagggcccaatctgttacagtgccctgcaagcactcagagtctgtcccctcagtcaggtgttctgcaggacaagttctgccagggctgtccccagtacagtaccctggtcagggagaggaggaagagtacacagtcccttcctgtgtgcccttccaccctcctcttcctttgccttctttgttttcctctctttccattctctctgtagtggagaagtgtaagactattcattttctcataccataacagagtccagtaagaaaccagggagtgagtctcctctgtccagccctgggctctgggcaagacatggcacatgataaaaaacttaaaagcaaccaaatgcattgtctcagacaattggaatacctgctgacactttcctgttgtgagactaagttgtgacaatggagttctatccagcaaaggaaaaagttatcctggacagtgccagcttccttttatcccagggacagggacctctaccttcagggaaccttatgtcaagcacagctttggaactcagcacggttaggcctgcagatgacgtcactggctttctgtgggacagctgcagtcagcatcaggacactccaggcatgccagtggtaactggaaaccctattttcaaatgcttccccagcatttgtgcacggtgagaagtgcttctcttagggcacaaagactgtccatagcgaggtcctagggagatcaggaccctctgaagactagggctaggctctgtggggggagggggaaggagcacatttccgagaggcgtactgttctgtcagtgggattccacttgaataggtctatggtgagcccaagggttacattcctaagttgtcattgccaaggcctctttttgcaatttcacttacaaatattgtttttgtatcagtctatgcccactgcctatcttctttgtgtatcagggcagcagaagtggcatacaggtagagaaatgcagggaggagggctttttccaagttttattctgtgtatatgaatgttttacctgcacacacatatatacagtgcttatgaaagccagaagaggcttttggatcctctagaactggagttaagggtagttgtgacccaacatgtgggtgctaacaactctggaaggtcctctggaagagcagccaatgttaacgctcttaaccactgagccatctctccagccccgtgcaaagggaagttttaatgatccatagccctacgcctgtttcagggtctgcaaagcaaaagagatgttagatatcagctcgctcgtgtgtcttcgaggtggaaagtacagtgaatccaggagagttaaaggggctgggaggctcacattgacactccatggggacagccacatgcaaggagctcctgggggccttaggaacagtgtcagcttcagttgaaggcccagcccccactctagccatgggccactaaccactataccctcagcagacactaggtatcctaccgtgtcgactcctttggttctcatctctactttcttgggtgggagctgtctctaacattggggaaagtgactcagaggatttcagtcacccaaggtcacccagctggttggcacaaggcctgttttggaaccaggatgatctactgtagccccgccaggagctatttctgtgtgtatgtgtgctactggcgatgaaacctagggccttgcacatactaggccagcccctgtaccgccgagttagctcttgctctggtcctaaggtctgcttggtgacagtgtccgaattacagttgaattccccagcctttcagctttcttttgctcactcgtgcaatagcatattgcttcatagaactgttgaaaacaggcacttggggtaatggttttaaaggtggggacttcccccaaccccccacccccccccccccgtcccatcctttaaatggcaggccgattgtcagcattgtctgaaaatgcaactgcctagcctagactaagaactcaaaggtgatgacttgcagaagagtgcactcggcagggggtgaaaggacattcatggatcagtctagggacagtccctgaggtggcctttgatgactttgctgtggggcagtggtccctctcccagcctggcttatgtgcttccttctctaggtttccctgtctgctgctgccagagtccacctccccagagggctgacaattgggtgcttctgaacttcttcgctgcctcccatgttcagaagcccgagctcctctggcccaaagtccaggcctctgccctctgccctggggcttgcctttccagaccccccttttccatgctgctgtaaatgcacgttgatgcccacagcatgctctacaggtgcttgctttctaaactcacatgtgtttcctggggttcctctccccctctaagctatctgggttccttgtcttctccagactcaatttattattttttcctttcagtttacttaccactcatctgttatgaggcagtgtgattcatggggggatgctgggaaaaccaggatgcacaaagacagacagtctcttgcctctgaggaggtctggatccaggaaaaggactgcctaaagtactgtggtcagtgtcctgagagtcaaggctatgtgtaaggtcttccacttacaggaagcctttctaattgtgtattgttatggaaatgcccttgcttcaagccttatgcatcttattccctgttttcttttagttccttgtgttttgcctgatataagtcacattcgttatccacagtattttttggattttagctgtaaggagcaaactacaccccctagctctgtcctgtgtgcggaataatccaaacgagtttttattgaactctgattacaaagctagctccttcagatccctgattcctcttgtttgttatcatggtttatatttatgtgtgtatgtggggagaggaggtgaagaggggatttgtacattggagtgtaactgactgtcaagtttagaagaagccattggaccctctggagctggaattgcagtggacatgagctgcccagtctgggtcctgggaactggactgtggtctctgcaagagcaatacagactcttagctactaagacacctctccagacccattttcatcctaactctgtgggtatgcgagacatgtacagtgagcctggtttgtaaagagtcagagacatattcacaggcacacagtacttaagtggcatggtctggctgtgagttttccaaacagctcaggggaaggataggtgactgtggaaaccttccctggaccctaacacatctttgaagggataaatggtaagtcgagagggtgaggtctcatggctgcaatgcaggtagttcattgaggatcgtgtcaaatgggcaactgggtctgtttgggtcaagggtgattcacacccatgcacgggcagagagagagagtctgagacaaataacagtgagaggactcatcaggcctccctgtggtgccattttggaggggtttggggaggatggaattcaatcaaaggcaaggattccttgtcatccatgcgggaggaaaagctccaggcccaagcattctgctaacaatgtcagagccctcagctggtctttcaagtatttagtggacctggggacaatgtgcacagccagaggaatcccagctccctctcagcctggctgctcatgctagggtctgcaatgaaagcaaaggcacagccaccctgtgcacactagctggctaggaggctggggcttttgaagctcagctgtttgagctacctacgtgtttaaaaagccttacctccatttaagaagaacaaagtctgtttcttcagcctgggcacaaatcaaaaatagttaatttttttttttttttttggcttcagtttaaaaataaaaaaagtcacctttgggttgagatcgagaatggaaagtttcagggcataagggtaattttgttttttcttcttttttctgggtctgttctaggcaagggcagttgaggtgctttcatgaaagttatgtgtaagtatgtaccatgtgcctcacctctttatggccccgtggtgtcccctctgttaagttgatgttagtaagattcctccatctgtctagcacagcagagtgttcggagtagaggggacacgtgtgaaattggatataagcaactaattggaacgcaaaggagatgattaaaattaagctgtatcttctaccaaggtggctttatcacatagagtgcgttttagcaccccaaatgagcaatgactcaggctcccaattagttgatgacaaacctctagagaggatgaagggcctaggggactatattgacaagtgggattaaaaatggagactccttaggagttctactaaaaaaaaaaaaagttacgaaccccggctggagtaatagatcggtgtaatgtctgcgcgcaagcttgaggacccaagttcaatccccagagtctatattaaaaatttgaaaagctggatatgatcagtggtgtttgcaatctcaacagtagggcctgggggaatggagacagacatgtctctggggctcagtggacagcagtagcttcttccgcccctcctgggaaaactgcaggatcagtggagcagggcaagggcagtggagcaaggacaggcacaatgcctgagctttcccactggccttcacgtgcatgtgtgtatacatagacatcccctctcacgcatgtacatgcaccctcctccgcaagtatggacaggccctgacagctagagtgagctttgcggagtgggatgacttgtttgtttgtggtcctctggcttcacagcccactgttgccaaggtgtgaagagacagttgttttgtgtcagttttactgtttctgacaactgttcctgaggaaatatacatttgtgcaacagaccgcctccaatgtcaggtctaaatttagaagccacctccgacaggtgctaaaatcagtcatacagaattcagggcggtgctcaggaatactgaatacccatgaggctatcatggcccctgatagaacttttgtgtcttaggccctcaagtttgacagagtgtggcatattttctgtggaccaggctccagacaagtacagtgatatgtcttcttggaactaaatccacacagctggaggaagccatgcctggtatgatgccattgctcccatctgggtacctgcactttcaccttgactctgtaatgtaccatctgtgtgtctggagcatccttacccagagaatgagggcacagaatctttttaaaaaataatttactggggatggagagatggcttagtggttaagagcaccgactgctattccaaaggtcctgagttcaaatcccagcaaccacatggtggctcacaaccatcctaacaagatctgacaccctcttctggagtgtctgaagacatctacagtgtacttacatataataaataaataaatctttaaaaaaataatttatttttgtttcatgtgcattggtgttttgcccgcttgtgtatctgtgtgaaggtgttggattccctggaatagaggtacagacagttttgcgctgccacatgggtgccgggaattgaactcgggtcttctggaagagcagccagtgctcttgactgatgagccatctgtcctgttgaatcttactcactctggggtcatttcctgaacctgagcaacatgattaatatacaacattcaggttgggaagaagaacttcaaattattgttccttgggtttgtagtggtctcaactaataacacaagaaaaaagtcttggttctgtcaagcggacattgccctgggttttgcctagtttctgccctggatgcccctggacctacctatgagacaggacagcagggagcctgggcccatggatctacctcacatttttaattttactgactactttagaggcaggatctgactacttttgagacagggtcttgctatacatccccagcaggccttgaatttacagcagtgtcagcttcttgagtgaaggtccattttctttggacaggatctcatgtatctaggttggctcagcacttactttgtagatgagaatggcggtctttcaactccttttccccctaaggtgtgcaccattacacatttaatcgtttaatcgtgtggaccatcctgatgtatccgtatagcctcctagtggatggagtctgtacaagtgaattggcttttccgtgtctgtttttgcacctgaagcttatcataagcagagtatggggatgaggggatagtctaagtctgggtccaggctttggtctttttgtcacttagcagtgtgaccttgggcaaaccatgaagccttggtcaacttgattccttccttgtatgtgggggtacataacagcactttatttgaattggtggtgagatcccataatctatgtaaagtatttacagtatagaaagcactgtcactgtgatagttctctgtgctgtggaaaagaatgagcctctctgggctttgttacagatggcctgtgtatgtttcatatgttacattgtaacatacagttctcctttgcttcaaatcctctatgcatctcttatatagcaagcaaggtaagcgttgcataagtagttgtgatattgtattatttggggaataaggacctgaaaaagaaggctgaatgtattcagcacaggcacaattttgtttcaactattcccaatcctcagttggctgagtctgccagtggagaattatagatacggaagttggcttgtatacatcaagtgagataacttcattctgcatccggcaagataatgcatgtaaaacccctcgaataattcttgacaatcagttctcagtgaacagtagcagctcttatctaagtagcttctattgggaaaacacagtcatatttttgtatcatttcatttcagtctgtgtctcatccaggatctatactagctctgactagaacaaaacaacacacccccaccaccacagcagcagccaaacaaccgggcttgaccacgttgtctggaaatttttgcctgttcagattctcatcatacaagtgttcccttctttttctagagggcacttggggatgtgaagcctgggtacagagaagaggactttggggaagaactccagctatgttggtggggaaagctcccttgggcctatggcctcaatgctttgtataggactgttcaggtttggcagaggagcttcttggaggagccgaggtctagctgtgggaatttaaggccttggactgggtaccattcctttgggcatcctggcctgggctgatgagccaattgcttaagtcttctctgctggggacagtctcagtggctctagagaccacttgagcacaactcttgggtgctgaagagccagctacttagcatccaggaaatctgatgcctgtattcagagccagggccacttagaaaagaaggctgccagctgcctagatcgaaaaccaccttatagggttccatatactctttccctgttgttttaggttgccccaagagaccactgttggccacaaactcttgtgactaattaggagaaatccatgaacctcccaagtgttgccagacagcagattgggctgggctgactcagggctgattgtgttctagggctgaagtccctaagaaaaataagccatcaggccttaacaagcatatggccagttactccctcacaatctgctgtattttggatcttaagtgtcccccaagccttgtgtgttgcaggcccttgaagaattactatagaaaggtaattatggggttctaaccctttcatcaaattcttcctctttcacatcccagtgggatgtattggtttgactcttgccgtgtgtgacctgctggcttgtcacaggcccagagcaacgggattatttgtctgtgggctggaacctgagcctaggagatggagtgtacctttcctgtctataaggtggttatcagatatttattacagtcaaagaaagctagtcaaggcacattaaatgatttttgacttaatttaaataaggcaagaatgacgaacacttcagcagtcaaccagactaggcctttctgagcctttcctttaacttcccaaggacaccaagaataccaactgcattgatttcactgtgaagctcaatgggatagagagcttgcaaaagccttgcaaattatttctctcaaggtaaaagaaaatattttcttgtgattcattgaattggtgttatgtagtaacatgaattagcatttacacacccaaatgcctcttgcctgatatagccttttgggagcccaattttggacgttaccctacttacttaggggaccgtataacagagcgaggtttcctaggcagtctgaagttaactgtcccagataacctaaaccattttgactgcatggggctgggaaatccagagccatccagcccacccttcttctgggtctgtcccggctgggtgtgtgtacttttacgtctttcatgagccagccactctttgggtatgagaagcttgcatcgctcaggttagagaatgcccctagctcatgagccctacatcacagggataattgtgggccttgattcatagtgagtctgaaggctctagagcaatattaaactgcccattggtagtgactgacagctttcaggattgaagtaatgagttcagagcccccacttgcctgtaaagcaccgtgggggtaatttccttgagtagctctttctacctaccttccagaaacctgcctcttgtgctctctgtactcagtgggtgtcacattcatctcccgctctttgaccagaattaattaccggcattatccgagggagttatttatattagtctcaaaccaatgagctactgcagctggaggaccatcaaatacaatgtatgctgattgcctcagtgacttccaatctgctttggcaggggctataggagaccactgagaggcaccaggctattattactattatgtttatgtttgtttatgtttaggattgatgtctggaggctggggctagggctggggaagtgcccaggaattctatttcttagggagtttggcttttatgtgtggacattgcgatgtggctgttgcacatagatggatggtggttgcctgtagttggatgtgaggtccctgattgggagtcttcatgacctggatgcccatgttcatctttgtccccagacctcagtggttcatagttccttccacggtccaagtttctacctgatgcagtgtagtcactgtattgagtcaaaggtgtcctggatgctcagcgttgtgtctctgtcttcaccatcagcccactatggagagcacgctagaggtgttagcactctgtcacataagttagaacttttaatgccccataaccacttccagaactatccttgcattctcaagtgtgtgtgcatgtgtgtgtgtgtgtgtgtctgtgtatgtgtctgtaggccagagattgacactgggcatcttcctctatcattctccaccttattattttttaatctgactatttatatataaatatttatttttgatatctattttgtgggtgaggaagaggggcacaccctgacaaaaccctgactgacggcgcaggagttggttctttccttctactatgtggctttggggaagttggacccacattgtcagcctcggtggcaggcaccttttcccacctgaaccagcttgctcggtccctccaccttgtgcatcaaaggtccttacagctgggctatttcctactgatgatctcctttgggcagagtgggtgggaaggctcaggagaccctcacctgagtatacagctggatgcagttctgctctatttgcatgtggctttgggatctctgagagaggctagaagacatgggggtggggtaaggactggagaagagccctccatttacatagccttggagaaaccatcagttcttccactgaggctgttttaaagttagccatgctcctgcttgaaacctctcccacactgtgctgtaaggagatgcaataaacccatcggttccccagaatgtactctgatggaatcttaccttcctttatcgtggggactcagggaggaaggggacgtttacatctccacaacagaagggattttagccacaggcacttgacccaagtgatgtctgagaactgtgtggaggaggggctctgtagatttccacacaagcttctctgaggggatcttaggaggcctatgggagcctgaagtttggtatgggcccctcagagcttcaatgttggttaattttcatgtatcgattcaagattgtaataatgtagtgagttttaccttgctgatacaagaaaaccctcaaggctccagaatacaaccaggattcctggctttgctcaagccactacttcattggcaaatgccacttgggcacagggggtctaacttgagcctctgtacagtcttcctttcacctgtttaatctccaaagtgttacaccatgacgtttttacactgttttgatatatcccttctaacttcagcaaaggattctgtactcctttgtgttgagtcacctggaaagaaggaccctaacttgaggaatcacctccatcagattggtttgaaggcttgtctgtgtgttgtttttcttgattaatgattgatgggggaagggcccagtccattgtcagtggtacctctgggaaaaatggtcctgagcaaaccatggagagcaagccaggaagcagtgttcatccatggcctctgcttcagttccggcctccaggttcctgcgtgagtccctaccctgatgatgtcttccctcagtgatggagtaggaagtgaaaagttaagtcatattttacttatcatagaaatggaaaacacagtaggaccgactctgattgaagctattgggagctttgttgttgtttttgttaatcaaataagcaaaacagaggtacaacttttttgaaaaatccaattcagaaggaagcttggggaaaaaatacataatagtggtttgccactttagtaaatatttttcttccttctggaaggaagcttggttctttcttgaacctgattttaaggtcacttctctaatacctgtgctgctggcccctctcatccccactttgtaggttctttttctttaataccccctttgtagaatagccagaagtgatctttgatctcttgagttttatttgggctcaaattaagtcccaagacaccctacagggatttgtgactttgtcatgtggttatcatggcttgggagggcaggtcctgctaactccttccagaagcagatcagctgtgtgccactatttctctggctcccccaacccctgacaccaggcccctcactgctccaggaaaaccaccctcctgcagtcttgattggataggaggagtctctgtttaatacattttcttatagcagctacctgtatgcgtgcgtgcgtgtggagggaagccacagtttgcaaaccagagggggactaggcagttctccctagggaatgcttttcctttgaacagagcttgtgatcacatgatcttggaagctggaggcatcagtgacatttcagtacagccccttagttcctctaccctccttgtttaatgttttctactttctctaggacgtttaggccccgctttgtccacagagttgtgatctcatggtttctctgtgtgtagagtctctgaacaaaatgaccttctaagcacccacagccttgggaaggtagtctctccagccagagaccgggggtccttgaactttttcctttccaaactgctcacaggatttctgtgtcatcttgtttaccttactggagatgagctatttcattcttgtctggaacccttttcggggaatcatagttgtttctgcgctgtaccccatggtatcaccaggctttcagagggtgaaaaatagcagacttgtcatggttatggaaaatctggcctggcttggccccaaggaatttgttaggtctgctttgaagagcaaccctgtgggctcctcccttcagcgtccactcgcagtgaccttggttggtggttccctgtctcctactggaacaacaacagagacattgatccctacttgaaccctttcatttggaatgttcagagtgaaatacgagatccgtattatttaaactagatctaccacagcttctgtgcctgggctctaccactctaggcaacgcaggaagggagggtgactcttgtgggaagggcctcttgtgcttttggtcactttgagtttggctcctggcagtacagctgttttctgggaatgtcttgctgctgatgttgatctgttgggttggggacactgggactcagttcctgatggggtatgacttagaaacagccctgagacagtctgctttctggaggtgggatgtcctagagacatgactggtgggcccttgactgaatagttcaggggctttctctgggtcaaagtgttgtctggccctggaacgtgttctctgtgtcccaacaactggattctcagacttggtaacctggggacagtctaacaggatactgttacgcactttgggcctggcattgggaagcacttcacccaggagtgccactgttgccatattccagccctgccctctgctctcctagatgctactcttcttagtgtggcaggagaggatgcttacctgggctgaagggccattagctcatgaagccaacatgggatcatttaaaatatgaatgcaacaccttttcaaaaatgcatattaaaaataggttttacaaagggtcaaaagataaaaaaagtttataatttagcttaatgaaagatgtatcgaagattactgtgacttatttatctctgctatgccagtgtctgtactatttgtgatgaagcaatattatcactgcttcctgtcttcccttactgggagtgacatcatgggctgccccaggaacccagggcacagtggttccccagtcatctgtgacaagagaaaaccatgatgaaaaccaccgcaaggcagggaggacaaaactctgtgttcttagaagggtacatgattgaaattcacagaacaaagtgagggtgatgagcaggatgtgtgtctgcaagctactcaccacagctgctgcccagatgagaccaggtgtgggctccatattaccctctttagtgcccccacactatgtgaggcatattgtttctgtttccaggagaggaaacagacccagaaaaggacacagaaatcacagagctgaaaatggaggaattatggtcctaactcaggagtgaccacgtccccagacctcatggtttttacccacagcagtgtgctgccttttccagaagcagaagccaaacttggtccaggctcctgctgcccacctcatccctcctccatcaggatttctggccccttggcactggcacattctccagtgatggagtttctttctcctctcctgccagctaggctcccggccttctgtacacagctcctttctgggatgttccatttgcctgggggaggggatggtttcccacagtgactcccagcctctgctgctgctgacatttttctttttgctcctctcagttgagctaggccgtgcaagtacgaatccgcagatggctgtccgtgagagatggaccagatgagaaccatgatgtctcctttgtaggaatggacttccaagagctgcccccagaggagctgagctgaacagcacaactgtgactgttcttggggctctatacagaccaccctggggaagaggtgatctatcactcataggctaaaactgccaggcacactctctctcaaacttccaaacattactgtgttcaagcagaaagacttaatcaagggaacatcttggccacacattggcctctggacagggataggaaggtcaagggatagagatatcaactgaaagagcatccccgaaggttcaaggtctgtgggttcggcttgcttatgtactatatttttattgaggggggttcctcagtttttccacttgtaaaatggtccataagagacttggagatttctagaacttcctgctggtgaacttctttgtgtttttccaccatggctgggagaactctgggtttcagttgcggatactggataaatttgaatttgggtacacaaaattctgtaagaggaattgggcataaaggtgaagtgtccttcctcccatccatcatttcaagttcagagcataatctggtcttgtatgctgttagcagcattgacttaataacatgtatatggggacaccacacacacacacacacacacacacacacacacttacttaaataaaactaccattttcctgtatctttgcatcacttttatattccaatatgcttcagtttctcccactctgagtagcttcccacattcttagaggcaaaacttaggggcagagcctgtggcattgcttagcttgtgggggcaacatataaaaatagcactccacacggagttctagtcctgcacgtctggagttttatttccatctttccttccaagactcaacagctatgccagtgccttagcttaaaaatgctccccctcctctgagaatgtgctccgagggaatccacagagctgtgcttctgcctagaaccagccagcttccccctccccacattcccaggaaggggggcatgcctgcatctggaaagcttgtttggaaattttcttgaaggtacctttcggctcttgagtttggtgggtctacaagaagtcccaaagctaaaacaagcagattaacagccgcacagatgttagatcgggatgctaaatctagagataaaggcaaagagaggagacggagagcatagagcttctgaagaagcacaggatcccagaaagttctcctgccttccagaagctgaaggaagatggctctggctccgtggtcctgcttggtagcagccagggatgtctacactgtagaggctgggagaggggcggcagccccaaccagaactcatgtcagaagaagccttttggtggactgatgtactccatcttcttcttcaccatcctaatctgatacttatttcccctctttctccttcttctgttgctctatcctggcctggagtaacactgaagacatgagcctcctcaccagacttaggagagtggctgggataggagatgtcgccatagagccccaggaatgcacacagctctgcatgccttccttgtcttctcatcttccccttctgaaagagaagcagtgggctatgggaatataccagttcctgcatgccccagcattgacagtgtgaacatgttctctgatgtgattgaatagtcccaaagatttcacttttgccctcctctggaaaatttctgttattactactaccataggaatgctggtttgaaggtactgtcacctgtcacaagccatggtagcctaaaatggggtggaggactttccaacctgatgcctaatgttgtgttaacagcctggctgggacatttcagtaaggcatcattgaaatcctggggaataacaaaagtgaatcaaactgaggatagtttcctcagcttctgtcactgtaccaaaatccctcacacagggtatttatgaagtatagaggtgtttatttgggctcatgattctggaaactcaaggtcaagtagcccaatggaattgtgctgcacatggcagtgggagtgtatgtctaagctggcattcacagcatgagtcaataagaggagaggcatcaaggaggacacacaaatcttctcctagagcctcaatatctgacagactttctactaggccatagctctcaaacatcatattacccctcaattcctctaccctgggaattaagcttgaggggcaaccattcaaaccatcacagtggataccagccagatctctgtcatctagccactctgtctctcataggtcacagcctctctcagcatcgttattttattcaagtccaacaggcccggtcaggttctctctgggtcccatgatcacttatcttctaggttcccagccagcaggactttgagcaaagaagaaggtgtgaggctaccaatgttaaggagtatgaggtctgtctagcatgattgacaagaggagtgttgcttttcccattcagggagacctgctccatggcattcctcatcatgataaattgagttcggcactgccaacaactaccgagataaccaaaggatgggcaaccactggcattgtattgaaggcaggggaccgtagtgtttagatatatgtgcctgagtgttacttgcacccctctccccttctagctgtgtaatcctggaaacctggcttcactgctgtggcctagtgtcctcctttgctgagcatgatacagagagacctttctcagtgctggtggctgtgacattcaggttcagacatctatcgagtttagaactgtcttcagtctattttgctccttgaggctatcaacatgccatttttgaagctactctgtctcaagtgcctaaaaaatgatctggttcataggagatgcttagtgattatgccttgatgaattgagagctggggataaagtatagcatgtggtatgaagccatctggataaatagaaaaactagagcccagaatcataagagcctaaagctggggttctctccgtttagcttatggaggctgatatgcccactgtccctccaggtgtcatagttaatttcagttgtcaacaagatgtacagggcaagtgagaaccttaactgagtagttgccttcattagaattaaccatggacatgcctgcaagccatctttctttctttctttctttctttctttctttctttctttctttctttctttctttctttctttctttctttcttccttccttccttccttccttcctttctttttttttttttttttggttttttttttttttttgagacagagtttctctgtatagccctggctgtcctggaactcactttgtagaccaggctagccttgaactcagaaatctgcctgcctagtagaaatcctcccaagtgctgggattaaaggcatgcaccaccacacccgggtcatttttcttaattgctaattgatacaagagggcctaacctactgtgtgccatccatggacaggtgtggtcctggcttgcataggattgtagctgagcaagcctagagtgcaagctagtgagcagtgttccttcatggtctctgcttcagttcctatgtccatgttcctgtcttgagttcttgccttagttcctgtggtggtctgagaatggtcccatagcctcatatatttgaatgtttggtgtctagttggcagaagtgtttgggaaggattagggggtgtggccttgttggaattggtgggtcctggggataggcttgatgttccaaaatcctagaccagtcccaactacctctccttctctgcctctcacttgaggataaggaaatatctcttagctacggctccagtgctccatctatttgcttgctgctctgcttcctgccatcatgatcatgaacaccaaccctctggattcacatgtgatccttgccaaatgctttctttgccatcttaccatgatcatggtacctccacacagcaatagaaaagtaactaagacaggtccatgtgagctaatgtggaagtcagataaaccctccccctccaagttactcttggccagtgtttatcacatcatcagagaagcatactaggacaggcctcccagtgtgcctgtcaggaccagagttgctagacttggtagatggttgttcactgaatgaagctctgctaggggacagctttggggaagcctttctctgctcctgagctaagtgggcatgggacatgtgaccagctgccctcctgaagttggcactgcctgccttaggcttccagatgctgaatggagatgggcgtggtgaagctgtgttttagaataggcacatgcaacacttgcttctctgaggtagaacaatgatccttgtgaagctatgtctgcctcctgaagccctgggtaccaggtacctggtcccccttttacttccctgtatggttgaacaagtctcacgaatcattgttcctcatccttgtcctgcaatgccaatatatcctaaagatagtatttaccttaaaaggtctgaaagggtttggcaagatggctcagcaaatacacacttgccgtgacaatgtgaggaccagagataggatccccagcaccacatagatgctctctggacacggctgcctgctgttaattccatggtttggaaggcagatagatgattccctggagcaagctggctgactagaatacgtgttctgctgaggcctgggttcaaataagagaccatgactcaatgaataatccagagaatgatctaggtagatctctgataacagctttggtcaccacacatctctccccaaacccacatacatatgcaaaaagtctaaccaaccaaccaaccaaaataaacaaaaaaacccaaaacccttaaaaagcccctcactgaatagtcctaaatacttctgaaagttttataacctaagaatcagctatttatttatttatttatttatttatttatttatttatttatataaaaagccagatcatttgcagctgtggtgggccatacagttgatctaataaaacttcttttctgtccatagattgcagacagatttggttctcaggttgtttctctactgacaaccattttcgatggtggtttcggggtcagcctattttgatttgctgttcttgggtacaacttgagtcagataatctgaggaaaaagcacaatcatgtgttgactttgcccttggcttcttctctacaactctttccaataaatacactaaggagaaggtattgaaggttctagaaatatgtgtcttctttgaagacttgctatgtctggaaaggctggatttcaccccagtttccagttcatctagaaaggcacatagatgggccaggattggaagattctgtgttgggtgaggtttggtcactataaattttcaaatgcttggattcttggccaagatgaatgaaagggaagggttgtttgagccaaggcatactatttaaggcttagtagggtgtgtgaaatatagtcaaccagttccatccagtcagccaagaccacaccattccttaatagtttatagtaagatgtgcaggtctctggggaagcaatggtacccattagcagtttgggtggatggctggatgtcggaggcactcgcttccaagagagaaatctagctcatctttgcacaggaagtttgatggaaaggtgggcactcttactcgacactcttgctattagcatctttcattttgatggaggagtgttggtcctttgccctggtggattgtccaggatgggatggtttcttggatcaagttatgggcatgttttagaacaggcatttggtgtggtggtgagatcgtggcttctagaaccagattgattcttggctgtgcgttgttacttgtggcaaccctccagtcctcgggctctgatccttgtctgcatgcagagggaagagggggtgtatgaggtgtgccctcactgctcttggacattgggtaactcttagtcacaaagcagagtgacatgtagaaggtctttgggcacttacctgacaaggaactacacagttctaatgttcccaagtaggaataagtgtgaaacactcatcgggctactattgtatggtgagttgtctctggtgagtcagatgcctcttgtactcctctcagagacatgggtatgggtgtgtgaaccaggcagcactgaggaaggggaccatacctcaggataatgcatgaccttgtattagttagatagtaagaggggacaacagttgccttgggccatggacatcagaagctgtcttgctctgtccttgtcttagtaggatcctcaaggctgaacttgcccttgatcgcccctccccgtatgatagtccttctgtctaagcatgacctaagtcttgcttcctatgtctgtattgaggttgtccctatggttcctctttccttttggatttcttggggttctcaatgatgctggaggggctggagatattttttattgtgagttagtgaatgggaacaccatggaagagggaggccttgaaggcttggaggaggacaacagggaggaggaggaaggagaggaggagggggagaaggagaaagctgctgtttgagatagctctctcacttacgtagacagtgtgtgatcacaggcagccccacacagactttccttcaaaaaggaggagagtgagaaaatgcaatttcagtctgtggtttctgcctgattcctgtgaaggttccttctgggctgtggctagaagtgtctccctcttttgccaaggacactaaacctgggaaaagtgaggaaactgggagccttgcatatgcacgggggggggggggttggactttaggacacaaaggagatgacatcaaggacacagaaggagggatttagggacaggggagccaggtcagtggcctgactaagtctggatgagctatattgggtctctgttccgaggccgaggcttgctctcccaggcatgaggccatgttttccaggcctaggtccataactccattgccagcagaggtgtgcgttttgatggagagctctgtgcagagccaacagagtgtaatatttatctagaactgggcttcccagaagacgaccctgctggaaatcttgcagtcctgggagaatgttcttggtcagaccgggattccatgcccagatgcctttgatgttggcataggaaacaccagacagtgtgtgtagccagctggcaaggctgatgcatctctatgtgaagatagagtctggggagatgataattctgagaaagcccccctctcccacaaccctgcagggtctcatccctccctgcccagccagagagcaagcgctaagcaattccttcttggaggattcacagttggtggaaaatgtgcttagcattttatcctactttctccccttcactgtcagtcaggggtgttatgggagtaagaactcatttaaatatgagtagctgaaaaaaatatcattaggaagataaattgaaaaatgcctataatacacttctgtgctagatataaatgactcctcacacactgccgcacctacccattaacccggagagttggaagatgtttgtggtttgaagctttcctaggaacagtttctagggaacccaactactggggattcctcaaagcagaatgtaaagggctgcatataggtaaatgcgtgctggaaacttcatgattttgatgaactattacttgatgaccacttcactcaccaggaaagaaatgcaacctctttccagtaccttttgcatctgtcatggcatctgttggggagggaaaaagatgggcaggtgagagccttatgatttatgaccttgggtaatggaaggtccctcccatatgggaggggtttcgacatgtgtcctcagagtgccaagcatgtgacattagttggaagttacagaaaacatgggttggaccggggctggggtgacgacagtatggcaggagaagtgcttgctgtacaagcatggggacctgagctccgattctcatcacccacataaagatctgtccatggcagcgtgcgactgtgaagctgatgtagggaagagactagtggatctaggggcttctcttagtgtagtctaaacaagccccagttggtaagagactgtatctcaaaagatgaggtgcagaaattatcaaagatgacatctcaatgctagttgttggtttccacaaaacgtccaatacggttgatgcgagtccatctacccacatgtgatacaaagcaaacgagatttgtgttctatacaatgcattaatttctagccaagcatgtttgttaaaaacctgggctttgagtttgagcagaacaggaactgaaggtctgcctccaaccggctgaggaccttgggcaggaaattcacttttctggaccacggttccttcctcagaaaatgaatgaaactctcacaaatcttcataactccatagcattgctctgaggatgcaaggacaatatcagcagatacccatagctggtagttaaaggccatttgggaaatggtggggatcttcaccaggagatagtggccacagcagcagcagcagcaggggattctgcagtgctgtgaataggaagttgctcaggagtgggctgcagccctgagaattgccaacaaaccataccactgtagtttgggtaatagcttggtgagtggcttctcaggactgttgtttggggattcactggtactcttgctaagttgtgtccacttccatttagagatgatgaacaaattggtttcaaaatatttactgtaagcaagtcaaaaaacagtaacattcaggaaagagtattaaaaaaattgtttaatgtcttaatacctaagaagtaagcaatatagacactgagagatagccattcaatacttcggcccccagcccacccccatttggaaagttggaagatatacctagatacttacattacagttttatggaaataattttacaagaaccagaccaccttctgcattttgatcttgacattgaatattaatatacttcttagttttctgagagaaaatgaacacacttgaaggaagttctgatctgggtaagtgtttcttagttaaaataggtattttcaaaacatgtcactgtggttataaaaaaatattaggaagttgaaggtaatagctttcttttttaaagttagttttaagatctattttataggttaggtttttggcattttcatacattctttgttcttttaaaaacaaaaaaaattattttggggggcattttgtacatgcacacactatattttggtcataatcaccctccccacttccccactaacactttttggatccactcttccctcgccagcctttttaaaaaaagttcagttgagtccaatttgagctgcccgtatattcttgggtgtgggctcttccattggaacatggtcagcctacggatgaccacacccatgaaaaacctggctctcccttcccttgaagccaccagctgtcggtagctcctttgttggtgctgtggtcttacaagtcttgtttctcctcctggaatgatggctggctaggatagaggtcttaggtagatagtcagcttttgccttatctaggagacaatgtttcccctgggtcctctgtcccctttgcctcttacctatttaccccactttccctgagcctttggggaaggatgagtgagtaccccgttttcctgttccttctgaccagatgtgggtttcttggagctgatgaggacctagccggagagatgtatgagtaaatgcatcttctgtagaactttgacactatctctgtcgttctttactctaaccagtcttcctccacaactctgctcctcacgtccccacccctttcctccagtctctcccctcccctccagtcatctcctttctaatttgatgtcagaagtcacagatttctgttaataacctatttagatgtaaactttggagatcatgctgtgcaagatgaagcaattaacactcccagacttccccgtatctcctccccatttttccttatccagaaatggcttgagttttacattgttaagatggataatactggtaaatcccagacccctgttcctagtgcaggagttcagtgtctagatgcagtcttcctgtctaatttatttagcagtctgaaatgttgttaagttggtctttggtttgcttcattgacttgcaggctagcttgtttcatgacattgatattcttattaatttcatctaaagcactaagcactgagaggggatttattatttctttagcctgtttcctttaggaaagaactcatcagctcccacatacagtataccaatatggtccaagtgctatgagtgcttttatcttttttttttctgggagctttatctagtcataattgctttgatactataaacaactatgttgtgttcctgttctaaaactttggccttggtgcctgagctgatttctgatgctgtcaggggtttaggagaacctgtggggtgaggtaagacccagagatgtgttcccttgcatggacctgttgtcctgttccactgttcactaaaggggacacaccatgggccctagacattttgaccatcttctcaaagaagcattgaaccttggagctgaggagtctctatggcccaggggcccctgattgctgtttgcagttatatacccacttgttttcgacttgtctctctaatttttcccttttgaggtccaaaatgagaatgtggcatgcgtgcgtgcgtgcgtgcgtgcgtgcgtgcgtgcgtgtgtgtgtgtgtgtgtgtgtgtgtgtgtgtgtttgtataatatacccacagtttgcctctctccaaagtgtagccatcagtagaacgtgtttggacatggtcatggctattaatgctcctggttaatgaagtgcatgtgtgggtgcctgactggcatgcccacccctacctagtctttgcttcagatctcagggctgtaaggatgtggcagtcccttcttaactgccatggccttccttcttggtatttgttttttaaattttgctcaattatgtattgaaaaggtgtattttatcatccactatgtcatctttctctttccttatatcttcctgagtacctttatttattgaaaaacttttttttttttttaaattggattggtgccccagggatgaggcacagaaacttttaattttaccaagtgtcctgggcaattctaataatcagaaaagtttgatattttagtgttagtttcccctcatattcttctcaaccctaaggttctgtgcttcactgtattgtctttaagaagcaagcatggacggggtgtggtggtgcagtcctttaatcccagccctggggaggcaaaggcaggtggagctctgagttcaaggctagcctggtctacagaactacttagaaaaaaatgattgttagcatagggttatttctcagtacgctggagggtgggaggctcacaatggaggtatcccagtgtctgatgagaggtcgtgtcctgctccatggatggaaccttgttgtgttcccacagtggagtgggcaagtcagcacgctttggttcctaagaggagtctgatccagattccaatggttgggtcttcaacatacaactttgctgggtacataaacagtcagaccaaagcaaaggcataccattgaaggatcatgtagtttctgcccttcatgatccgaaagcactgcctccatcttagagcagacttgccctggagtttggtgtagatcatttgctttcatgggagagcacttggaggtagtttggatgcttcttcaaacaccgatgttgttctgttagctacttttcttgccactgccaccagtggaggaaagccatatggtggcttatggtagactcatggcagtgggacgagttaggtcatgcaaacacatgggcaacaggagaatgtgattggaaggataatatatcctctgaggacctgccttggtgacttttctaagcgaggtctcacctccttatgctttcacagcctccatacacagtgccaaccagttgaggatcaagtgttcaaacttgagtctgtggaggcatttcagattcgaaccataacagatggcttttccctggtcagaggttactgcgtcagagtttactgggtcagggtcccctgcccctgatgttctagccaatagatcctcttccttatttcctcagttatttagtacctattcttggctttccttactcatacaacaagccttcactaggggaccatgtatttcccacccactggatagttctgaaggacaagtggctacaacatgtagactgttgcattggaagagtgatcttgggagtaatggaaacccgaatgtggatcattttcctgcccctgctgactgtgtgatcttgaccaagtaacctaacttctctgttccccaggcaaagtgtaggaatttcaattctgtcttgcattgttttgataaccaaaattaatttggagtgctattaattatgagagacatcaattttctttggctttgcttaatatagtatttttttccctcttcattttcaactgtattaatcagggttctctacagtaacagcttctagagtgaatctctctctctctctctctctctctctctctcacacacacacacacacacatacacacacacacacacacacacacacacacacacacacatacacacacacacacacacacacacactaagaatgacttacacaaacaatggctggctatgaatggcaggttcaagaacgcagtagttgctcagtacacagggctggatgtcacagagggtctttagattctgctgggctcccgaagaagcaggctctaatgccagggatgtaatggacttgctagcaaggtgagagcaaacaggcaaaagggcaaaggcttccttcttccatgtccttatttagacttccagcagaaggtgtggctcagaatagacctggattagaggtgtgtttttctacctcagagatccagtttagaagtagattaccccacttcaaattaagcagaaatccctcacaggtgtgcccaattattaaggctgggttttagatgtgccttgtaactaattttgtttaatttgaaaatcttgtctgatgatttctatcttcaaacagggaaatttaatccatttatgtttattaagattacaggcaaactgtgccaatttttttctctcttttttgggtcattttacttgaggtgtcttggctcttcttttcgctttcctgtcttctgttgaatggagaattccttcgctggctacaagctaagggttgcattttggttttttgtcatgtcttttaaaatttggagatacgtacttaaccataaaattttctaggaacattgaaagcgacacagtttatttcctaaactaatgtatataatctctagcacaaagcctgccttagaaggcgtaagaattccagtgactcaagtctctcttgctattgccaacactacgatgaatattaatatcataattttgcccaaagacacactaagcattatttttatccatggatatgttgtaaagaagctgagagccatgaatattatccagaagaaattctgtcctgaatagtaccattttttttcccaaacaagggaatgctaggaaagacaggaccatatcgtacttcatttttctcccgggctcatgataacatctctcatgagctctcgtgtttgcaaaatgttatcctgagcttttgataagtcggtgtgtgtgtgtgtgtgtgtgcgcgcgcgcgtgtatgtgtgtaggtcagaggtggatgtcggtgtcttcttcaggtgctctccaccttattatttgagtcagtatctctcactgaagatatgatttgcctattaggatgaggctagactggctggccagcaggacccaggaatcctcttctgctcctaccagagctgaggtcgcaggtgtatgtctccacgcctggatattttgtgtggatcctggggactgacctcaagtcttttgtcacagcactttactgattgagccatctcttcagctcagtgtgtcagatgctctactgtactacactgcaggcacatagtaaccggtggcttttacacagcaatgaactgaacttccttctaaaagcatcccaattttgactagttcagctagaatctgattctgcacctgtcatcctgacctctgacccaaggctggggctgctccatcctgctctggcggtggctctgcctggcaagtggccccctaagggtggtgaagtggatctctatgattctgggagcaattgctggtgaatcaggagcacagcaagggatggagggaagagtgaagtagaccttttctgtggaaggtgcttttacatgacccattaccttggcgacaattctccatcactgttgtcccccagtggctgatggggagccaggaatccatagccctgcagtttttgtcatttagatatgccatatgttctgcacctgaacccccattgttcatctgggaattctgagtgaggatgaggtggcagtgggcctcttgtggctcgtgtctttcagtggtcctggcagcacagatagtctgagggtggcaggactcacacctgggaccactggctgaccataggactgagaattatgacaggcatttatgtacactgcccagtgacaggggctgccaatctttaatagatcctggaatggcaagagctgggaataagatgggggtgtgatgcattctggcagagatgggtactgtctataaggttaccttcttagcctcctctatagcttacccataattcactaggcaggtgtgttggctaactggggtagaagagtccatgtgctcttggacaagccactcaactatgggtgctttgtcaccttcacaatgtggagttacttcctcttactgcgcccactcacagatggatggagaagaccagtgtgagaatagccttgcagactctggaaggacaagagtcgggcaggcattgttccttatctgggcagggagcaggtaaatggatgggggaaagacccagaatttctagctcttctttgaaaccctcatcttcagcctgtgttacatccatccatccccacctactaactaatgcaggactaaaaatggtgacatcagggagcaggtcattgtgtgtcaaaggctgcctgggcttagcagtacctgcgggtagctgctgacctgaacagccagtgctcacaggtagggcacagcacactggatcccatgtgtgaacctagaaccatgccctagacctgctccctccacactagggtcaaggggtaacacttgagcttttaatgtttggaggagacacagggagtccctggagctgcctagagaaggagctgcccaagggctcatgacattcaggactaaccatgaatgtggatggtaaatactaacttacattcatcctggagtctataactgatacttttacagatgcacttgaggaaacaggcttggagaagttgactttgccaagtccatagagctgataagcaggaagcttagattttaatgcagataggacatactcaagatttgactcaaggatcaggaaggttctacaattggaagaggttgttaccaaggaggtcctcattgctttgcagtagccaaagatcctgtcaaggaatttgccccatgggagtgctgtaggttttcctgggagctggtgggatgaaaatagatacaaatgtatgaagagttcaatactctccctctccatctctgtctctctgtctctgtctctgtctctgtctctgtctctctccctctccatctctgtctctctgtctctctctgtctctctgtctctgtctctctgtctctctgtctctctctgtctctctctgtctttctctctctgttgtacagtgcctcacaaaggttcagactgcccacagtcagttcatttgtcatagtacctagcacagaagaagcctgcctgatttgtcaaacaaaacaaaaagaaaacaacagacccatgcacgtgcacacacccccaaaccccaaaccaaactaaaggaaaacagtaaaaaatgttcagggctgcagaggtgctgactgctctttatgatccaaacggcccatcatgatgatttgggcgacaggggaagctggctggcttttggactctaatggctttttaggagttgttatattcttaataacagattgttcctaggctagtttttaaaattatagttcataaaaattatatctccatttaaaggcagatgagaatggaaaagagcaagaggcagtgagtggaacggagagattgtaagtgactccagagacagtcccactcaaggacagaagaggacacaagctctcagtggtttcttactttgtggtggtcctgagactgtcaacatgcacagccaccctctaggttaacttgtatcttaggtgatgggaggtccttcatgtgatttttgggtatttgtctgtggcttaggggagagctggggatgatgagctacctcagccttctctagggccactgacaggaacaattcatagggttggttcagacttgcttgattgtgtcagaaaagcaggggaggggtagagcctgccatacagaagcatactagaggcagtgaactatttctctagtcctcaggattcctgccttcagccttggctgtcttacttctgggatgctgtcatacttttgtgtttgcaaacgaagcaagtcctgcagaagagaaatgacttgtctaaggtcatgtagccactgaacagggatgggaatctagactagatgcctcagattctagggttccattccctatatcatgtaggctttggaatgaattggcttgtcagtgtttcctctagatttgctgtccttggagtgaagaatatatctgaccttcctgatgcctgtgtggatgacaagacttgttagggcaccagagacccactgacaatgctcagagattcacatagtagagaaggcatggggttttcagggcatggctgatcagcctaagactgtcgactacatatgtgatatccatcagaaaatggagatggagacatttactcaacacatatgcacatacacaggcacacacacacacacacacacacacacacacacaccacatacatacatacatcacatttctgatgtttcacgcagtaaaaatttcaacagaagttataggattaattagtacggatggtagcatcacaagactgagagtggtttaggattgtcaggataacatatgtagaggacatggcagccttctgggtccctttcaacattattaggctgcttgggctggaaagtcaatgattcacaatatcagctgatacttccctgtgtttatattttaatacttgattttagcttgactattgaccatctaggttactctttaaaatgtcatttgtttctttaataatattttattatatctatctatctatctatctatctatctatctatctatctatctatcttgtatgtaggggtacataaaagtgccacagtgagcatgtgtgtgtatgtgtgtgtgtgtgtgtgtgtgtgtgtgtgcatgtgtatgtatgtgcgtagtggcaggaggatgacttgtagaggttgtctctctcctttaacttgtgttggtcctggagattcatctcaggtttggtcacaagcactgttacctcttgaatcatctcactggtcctgtttgcttctctatgtggctctgttgctttatctccaaaaggaagatactgtgaagacctgctgggaccatctaccactgccacggtggatatgaacttaggaaatcagaaccctgccttcaaaccattaagttcatggcatcattttctgttctgaacatgctagtttgagtggaccgactccctggattacaggagtaccaaatgggagaagaaatagtaatttgagtgcctttccacgagccaagcatctgtgtggagcacctttcctctgttctttttgtttacaggagggtctctcctctcttgccagcctctggccctcctgagaaccctctgaaagcacacttaaaggtctctggtgctggaatcaagggggatgcctgttggaagatccttctgcagctggcatattgcatgaccaacaggggagtttcttcctgctgagatggcggccagcatctctccccacaggcaggatttggtgcatcttcttgccattgctcctcctctggactatttctgatgcttattgacttgctgctggaaaacacttcacagggataatgaaccaggcagttttcctcttcatttttctttgttgttgttgaatacatatgggtaactggggctctcctcttacactttatcgattcctgaatttacgagatagtgctgtaattgacaatttcatcagtgccttatgggcagaaataagtgtaggacctgtggctgctaactctgcatgaaactgggacattccaggtctgatctatggcccaagatggcatcacttctttccaactgtgccctgacactgctaagtgtccttgggcatgtcacaactgccctttcttggatctggctttcctttactggtttatgagatgttatataagatgaccttgacagcagcccttgagttctggtttcctgagttccagtctgagacaaaagccctttatgttggtggttctgtgtgtgaaagcttgggtatctccgtgtttcagatgatattcttgatccactcatgtgttcttgcctttgttttccctgggggcctgatggatgtggctgagtcatgtgctggcacagccagaatcccttgtgactaagctatgtgtttggggagagctggcagagccactgtatagcatctggatggagatagcctgactctagcattcccctgatggggaataaacctcaaccttgttggcacatagaaatagtacctgccactgtttttcacaggtcaggactcctccaacacacccttctaaccatgcctgtccactggctacaagccctgcttatgaatacaaggatctgtctccttccagattattatggaaaatcttgctgtcaagttcttaggatgggattaagtcaaatgtgtgacaaaggtcggtgcttggcttttatcccacctatagcctgcagacaagccagacacttgcttagaaaagcaacaatgccttgggatttggaatcagacacacaaatgtttgaagctggcttcactacagttggtggagtcacctaaacaccagcctctctgccactcagagtgtattttctaggaaggtagaaaacagctttgatctaatgacattgccgtgaaaaccaagtgggcttctcttgggatctacagctccaccaagccagtggtgtacaagatgctgtggggaaggccacagacacgtttctttttatagtttgtgtgtttggatgcgcttgtgaaaaaatagaagcaacacttttgagctcgtgatttcacagatattattgctcaggacaacattattttgaaaaaaagaatggagatagttttgagttgatttaaaggacaataggtagagcttattagaacagggcaagcagacatggtcaaatccagcaagatggtcactgctgttctaagtggttacaaatgtctagtgtagacaacacaataggaacagatcaagatgtctttccattcttgtcaattcccggaggaggggatgggtacttctgtaagaaagcacaagagcagagaccagcagtggacaaaccctgtacattccattagcctagcaggggattctgcctggtcggtcgtccaggcacttgagggttgccatagcatcggagcctgagagctaggagaggtcttgaatgtgatctgttgttttgtgtaaaacttaggtggttttatacacagttattttatgaatggaaaactgatgaaaagacccagagagaacttggcttgcctaaagacatagcaataatgacataggtgaagtgatctttctgtcttctcctggggaagacattatttcctatctggcttcctattgtggtcagcagcttctttgtttaaaggtcttagtgcagacctgcctgaactcagatatataatcctatctgttctccatcactgtgggtcctctggccctcacatgctagaaagaggagtggacagccagctgtgagaagaagcaatgatctgttaaagtctctcctttagtgcctatgatgttgaatcattagcctgcgagccaggatgccattagcctctgatttctcccatctaagctctatgcatttaggttgaatcatggtgggagaggccagtgctaggttccccctataaaaggagttgagatggaatctgaggccaggaagactagatggaattacacagccaagcctcactttactctcaaccatgaccatgacctccctgtctcccaggtcattgtactctgtgtgacgtttttcagtttgaaagtagaggtagattgagaacttggacagagtatcttgagagcccagtctcatcccagcatatcctatgtgcctcagagacaccaacatcatatgctaggctcctaaggcctcccaattgcagcaggaggctgtgtatacagtgtggaacccatgtgaaaccccagggcctaatcaacagaatgtttgatttcctctcttctgtatttcttccttgttacttcctcttctctcccaccagcctcaaacctgtctttttctaagtggaaaaggcccacggatggattctccttggcataggaccatagagaactcttgaactctgttatctttccgggaaggagaggatagagaggtgtgaactccttcaacagatatcccattgtccctagaactccctagcttatgggccgctcatggtactttaaggcctactgcagaggtgacctgctttcctctgacactggtgtcccagggtacctcttcctacctgatgactgctacaagacagtgtatctcctctccattgtgtgagtagcccacaaggaggacactctaccctggcatattagctgctgatccaaaagcctctattactctgtatgactgaaggtgaggatgctcagagaatggtgtggcctggccacagatattgagaggccccctatggaagtgaagaggtagctccaaacgagtctgtcctgtggaagttggctccagtgattatggctcacaatgcaaagctgggagggtgccagggcatgttaatactgcatgaggcagtaaggagacctgggccttgaaaccagagatgtggcctagaatggaactgaacagtgggcctcctcttaaaggggcatgacgtgctcacagaggtatgcagtggcattatttccctctaaggctgctcgctatatttgcacacaatgcttccggaagggccggggccatggattaaggaaggtgttttgagggaggcactgcctgactggatgattgtcttgttgttttggctagtgactgagggggagaagttgaaggaaagtagatggaggaggagaggaggcaagaggaaagagcaagaaaggtagaggagacgaggcagagaagggagcctgcaggatcttcttggattctgccacagtcttagctagtaagcagattaagaaagggtagagagggatggagctcagaaggacccacatgaccgattctggccttctaggtgctgccatccacgttcctgctcctttccttcaaagcagggctgagggtctgtccccatctccgtggagagggtctaggcagtgctgtttcctttgagaattccctggctgagtccacttggccaggatccaactgtttaaagagcatcaggataccaatggatcacagtcaggatcactgatgtccaggatttaggtgaagggtggcctccatctgaggggtgcctcaggggattttctaggcatttggtgttaaaagttctccagagggcttgcattctttccaaactggtggctacctgcattagttaggatgcttaatcacatcaacttttggaaaacaccaactctgattagcttacagtttcccccgtagggagaacataaatcaggggagagcaagtgcttgtgcaagggttcagtgatgttggtgaagccctgggtgcctctcttcctttattctggcattcttagaggcctcttgttaccattggttggcacctatgctgagcatactcgtattcttggccttgtgtccgaagatttgacattaaaagctcacatgcatttataaaagaagcaagataactctggagttagggcagggaggctggattgctcagtggttaagggagtgctgttctcaaataccatcagaagtaaagctgtaccgtgacccacaccgatatgtcagtactctggcaccttttcttctttctctggagctgggtctctaggtatgtctggaattgggatcccagagcatcatatgccggtgtgcaacattttctaaagccagcctcaggatcctatgtacatttgagtgttagaaactcctagacctgtcaagatgcccacaggagacaagggaagctgtctcagactcaaagcgaacaccatctgcagtcttggtctttgagctcttgcaggcttgagtgtgtggtgcaactcttggagcctctttttgtatcacagggaatgttcttggctctttgatgactcaagctttccagctttccttttagcatctcacatgctcctggggtcgtctttcttgttgtgggtatagagcttgggcagagcctaagctctccagatggggagttttgcaacataaaccctattcttatatcgacttctcttggacattgaagggggaatataatcaaatcatctatctacctatccattcaccagtccatccatctgtctatccatccatctacctacccacccatctatccttctagatgggatcccatgatttctaggctagcctcaaactagctgtataacagagggttatacagtctctgaacttctggtctctacttcttgagtgctgggcttaaagctgtgtaccatcaggtccattgattgatgactggtttatttcctttgaagactagatctactgtaaagcccatgatacttcttcaaacttcaggaaaaaaaaaaaaagaacaaaaccccccaaatcaccaccaccaccaccaccactaccaagaattcctgagtgaaatcagacatcagatcttccacctttcctgaagacagtatttttatagagaaatacataggaatgcatgttctttcattagcatttcaatactccatctctcctcccagaccccagccctgcctgcacattgcccatgtaggggttccccactaatgaatcctctgttttgttttgtttatttatttatttattagatattttctttatatacatttcaaatgttatcccaaaagttccctataccctctctccgccctgctcccctacccacccactcccacttcttggccgtggcattcccctgtactggggaataaagtttgcaataccaaggggcctctcttcccagtgatggccgactaggccatcttctgctacatatgcagctagagatacgagctctgggggtactggttagttcatattgttgttccacctatagggttgcagaccccttcagttccttgggtgctttctctagcttctccattgggggccctgtgttccatcttataggtgactgtgagtattcacttctgtattttccaggcactggcatagcctcatacaagatagctataacagggtcccttcagcaaaatctttctggcatatgcactagtgtctgggtttggtggctgattatgggatggatccccggggtggggtagtctctggaatcctctgttttagctcttgtctttgtcttctctgatcaccttcattcaggcgatctcaaagtaggaaaagctgtgtttaccaatggcttatttacctggggtaagttctagttaataacacattttgtttgtttctattccccccccccaaacttggtgagtcccagtgcaattcatctgaacaaggtgagaatatttaaaaagcaactgttaagttcctagcattctggtagatactgtgtgtttatctgtgctattgatgacatattttggtgctgatgaggctgaactcatgacttctacagctgttctaggactgcccttgactctactgcttagatggagtggtggcaatgaggttcagtggggcaggcaatgcttctcttctctaggatgccctagcctagcagaggagatgagaggtacactagtgtcattttgatcttgatctgtgtggaagccgttgcttgagagatttctgagcaggagagagccaccccacccatggggagaagctgtggagaactctgcacctccatgggacctgagcttacacactgatgggaaacatactatgttttgtggcgtgtgctggggttaatctgtgcggttcactggagggaaaggccatgggttcagttgaacccattaaagctctcagtgcttgcggtatttttatgctcacagtggaaagacagagcttcacatcgactgttggctgctctgagactcatttcttgtgggacctgtattcagcagagcgcaaaagtttggataaagacagaaataggctgaacatcagccccgcccccgtccctgcttattacagcccttcaggagtgagagctgtgaggtgtgagtgaggggatgttgggaaaatgctctaatttgcttctcctgtctcacattcaacttagcacccttgactgtagcccccagcagctacccagttctaagacttctggagacttgaggcaggtaaggggtgttgaaggggaggagaggcaaactaaaaagcaaaacatagcggggggggtgggggggtggggtgggaaccaacacgactaggcaggtgcacatagtctccagcctatggagtgccctgaccctgatctggctttcctaagatggaagaggaggtccctgaagaaggcacctggaaatagctcatcagaacttctaggaaggtctgggatctctttaaggttccccaaaatcaccatagagagtgaggacttagaatttgggtttgactagtgataactaaggccaggggtttgggatttataagtctggggaggagagcacaagggtgtcttttatctatccagacttcactcctagggcactggggtgaggggaggcagaggctctgctgagatggcaacaacctcaagaggtgactagactcgctctatcagacaccttctgtgtgctgggggctaagtgaaagacttcagtcttgagaaatggttctcgggcaaccacaagtgacaggtaaggaaacagacacagagagaggctaggttgccttagcaatgtcactaactcagggaccctggttccagaggtacctgtgtagaaaccgaggaaggcagatgagagcaagtcaaggaagtaaacgaatgggagggagatgggagctcagagaagcgtcctgagctagagatgttcctttctttccgtggctccgtagagaaaatgttatttggtgagggggataagaaacatgtctgtcattgctggcactctttacctctagaatgttccactgagcacgtgccgtggtcccgtgtaccccagagcctgtacaagtgcacttctgcctggctggactccttgctgtttctactctttgtatattggtttcttcttccctgtcaaattctaatttaaagtcattgcctataaagcctggcacatggtccatgctcagcagaaatctgtttagcaaatgaaccagaagttctcagggttagagagaataactatacagagaagttgggaagacttttaagggaatctgttggcattttgatgtcttatgtgagttcagagctatagcagtggagatgaggttgaagccaacctggactttcttggtcaagatgcaggctaagctcctatccttgcttttctctgctgatcctgagaaaggctgttgtgtgcctcacaggctgaggctaacgggaggctggagtgaatgtgaaggcttgcatgtgtcctgtagcttttgctgtgttgtggccagagctttcctaagggacacagaaccctctaaacaatagctagaatcatcccattttgaacttttttcttgggttggcatgggaaccagatgcaaactttatctttcctacctgaattgttattttctgaattgccacacaacatggcatcagatacttagaggcttctgtgtgtgccaggcattctgccaggccttttaagtctgccattttgttgaaatcgttcctgtcttcacacaaggacccactaaatggcatgactctctggggacagccctgagccacactggaccttgcaagctatttgttcatgtaaagtccctgccagatttacaataccaccaagcagaaggcacttctcttgccagaagactccaaacttgaacgttggaatattttttcccccgttctatgtgtgaccaagcaagttctggctgttgcagtaaccgcagaattccccctgcttcataatcacttgtattatttattatcctggttattagtaataaaagccataatgattcagccttaaggttggcgaggcagcagcaggcagagcctgacctttgtagggatattaatatactttcacagcctcccttcagatggtccagactcatggaatgagagccagcccctgaaaataatcgtaaaacaaaagaatcaactatctctaactggggtgttgattggcaagtaagaaccaagtgttttacaggaaggccttcaaaacaggaccacatctctggccaacttctagaaagtgtgagacatgaaagcaaggcctgaggagctgttgtttgccctggcctgtcacctctgggtagagatggtgtgtggatagcatcagctgccttagtggggcctagatcttgtccctttcccgaaggtgttgtagcacgatgttttaatccccccctgagcgcttggctggctggtgaggctgcatggaaaatgtcagcctgatggcccaggccaaagccagcatgccactcagctagctttgcagggctgacgtggcgtgtggctggaagctaatggaaaggtcacaaaagcccaggacaagggaagggatggggccaatagcattgccctgtaacgtgatctggaagatgaaattgtagcgtggagctgagagatgcagggctggggaaagagacctcagcattttccatgattaactttctaatagtaaccctgtgtgtacagcgggtgcttagcaacgggaggcatcttctcagagagtgcgttaataaagtgcatgtggcttcccactgtgatttggttttcccctgcttgctggaggcagagagatcagaccacagacctgcagccctcgaggctgaagtcaggaggcagctgagtgtgtctcctttcctaattgagttgtcccttccctggagaatccagcagagcccctcttgcctaaaagtcacaatgaaatggatacttaggaaattcctcatgagttgagagagaaccccagctcttagatttgtatgatatgctgtgatatgatgtatgtgcatgtgcatatgtttgcatgcgtgtataagtttgtatgtgtgagtgcacgcacgtgcacacatgtccttgtgttttttcaagccggtgtgtttatgtatgccagaggttgatgtcgagtgtttttgctttttcatttctcattttatttaagaggaaaaaaattagatttctttattttatgtgtacaagcggtttacctgctcatagacatgtgcaccataagtatgcccggtgcacttggacatcagcctgggttgtcagatcctcgaaactggagccacagacagttgtgagctactgtgtgggtgctggggaccaaacccaggttctttgcaggaggaataaatactcttaagtactgagtcatctctctagagcctaccttatttattttttgtttgatataaatagacttgcagtagtctcaccccctactcccatctcttatcttcctttcccccacaccttctttgcccatcatggctgtttgacaaggcgtgaggacgctcctgtctccaccttggcaacactggtatcacaatccgtattccactcacctaagcttttacgcttggctagcaagcagctcattcactaaccatctttccagcttttagcccttagagatatagagtttatcatatgactatgataatggtttcatgtgctacaaagaatgcccagcctggcgtaggaggacctgggttactggaaatacagaaaaagtcacctatggcatttggggcctgaggccttgcaatggcttagtctgtttcaggtgctagggacccagtgataagataacagacagggagtcattttaacctatagactagtataggaagtcacagcatggtaaatgggcaatggtttctcttcctttgatattaaatgattttgaccatgaaacaggtcatgggggggggtagtcatttgagtgtgtaggtgaccagtcaggttctctttaaggaccaggatcccatgagatatctgtctaaagggaatgctgtattcaggcatgtggaatggcagtggctagagtttaattgctggagtgactctgtccactgtctgcccccttgctgtcttcctccttgttttatttgttcctggggtacttgtcattgttaataaatacctttacatttggcacatccgtgtgcattgtcacttgcttccatggctgtcccctgagggctccattttatctctctgtccagttctccaccagggaggagcccagaaaggtgattctctgcatctcctggcttgaagacgagctgaaaaaagttgattgacaggagaagcgggtggagtcaagtgaggggtgaggaggtccaggcgtaggtgtagagggaggggctggaaatggagcctgtagatgtccctgcccctgtctcactgctactgggaaggtatggctaggaatcaggttcctgggtctgtgagccctgccttgggcatctcagagtttcttgcttccagctgctgggaccccttctatgatattcttgtgtcctataatgccatgatgcttcagttgttgtgtagaatctaaatctgtgatcaaccctgatgtcaaatcagcggaggctgtatttccagaggcactgtatgtgcttatgcgtaccgtggtggctgaagccagtagcatctttgtcctgtgcatctgtgcagaggtcaggcagcaagtgacacagggacacactcttgctcatgatcctgaagcagaggtctcaatggctgctgacgccagtctgtgtttataccagggagttacattggagtgcctgttaccccttttcctgcccttttcagtgcacacacttatgtgtcccttagctgttaccctttgccgtctgccctagcttctctgggactgtgcccatttgcccacatgtgggcagcacctcgaaatgagaatggggaggctctctttcagaggttttcctccccttcgctcacctctcctacccactcgggagagtttccgatctgtacagccacactggaacacagaaacgtgatgaggccggagtggaaagttctgtaggcatcccgtccactgagaaaagcaggagagggaaaggaagggaggagaggcgtcaagaactccagctttgttcaatgctctttagaaatgtctgactccttcatgtctcatgcattgtgtagcttctgtgtgtgtgtgtgtgtgtgtgtgtgtgtgtgtgtgtttgagcctgtcagaggcactggacacagccgagagtaatgcagacagtcctgccttggagagcttggggttccagtggtaggaacagggtaaaaaagacaagatgtggtccatggggaagacacaaagggacccctgaaacaggaatggggagcactgaacatacgaggatgcctttgcgtcccataagctattgtgagggctactgtggtcagaggaggaagcaagcctgagagtgctgaggtaagatggtgttgtagggcagcaggatggaatctccttcaatggagagattagctcaatatgtgtcacttgtaaaatctggtctccccagaacccttggctgtatggggttctcttcgggctggggttcagagatcatttgctttttgattgagttacttggttctgcttggagctgcacctgtgatccacaggctctgggtctggctgcagggttgggagatggaacactccacccttccttgtgtggttcccagctggtgggtgcttaagtggatgcgtgggccctggaagtagggtatgtacaggaggatctgatggtgcggctgctgagtgctgggatggggaggagccagtcttgagtaggggccagcatgaggcgaggcgagccctgggacttgggccatggcacctacagtgtgatttgtgatgattccccttaggtttgtttccaaccttcaagtaagtggagccatgattgctggctgtcatcttggtttagagctgtatgtttagactacagccaggaagacctccctaaggagaaatagaggagaaggaagtcttctgatcttcctaggaccactgacaccctactctgcttcacagggaacaaactcaggttctgcaaatagattggtgttcttggcacagttagttttttgtttgtttgtttgttttttaaattcatcatttccatttatggaccaaagtttttggatacaatatctgggttgttcacttttctaacaaaaatgattgaagatctgcacagatggcctgcatcccttcacggcatcttgactaataggcacaacagttgcaagttaccctttgcccccatgcctttaaaaaacactgtctttggattagggaaacaaatgtgggccttctgtatattctcacaaatgtctccttagctccagagttctgctgacagcccagatgggagccagcactctttggcctctatgctgaagagtcccagtgagtcccttctgaggtcagaaagaagcagataggggcagagcttcaggccgcgtccctgaacaacatagagaacatgtctcccatgtctgtaacaatggcttctacatgtgggtgcatgggataaagatcagaggtcaaggacatccaaaaggctaagcacagggaattggaagatgcaaaagcagtatagaggtggtgcagctttgcaggggcaggtctcctttgttcctagcgcatgctccccagcttctcttttgccttgttctgctcattaagctggtacctagtgtttattgggaggaatagcaaaggtctgacacctgttagccctgagcatcttagattacttcccttcccacatccaggatctcaccttgcccaacctacctgaggttttctaaactgcagtgttaggaaaggcagaaagcttcaagggcctgccttgggcacccacttcctttctagctgatccaggccctaaagaggataccaaagccacactcttggggtgacctggtctaatgtgactccacaaaaatcctgtggcagaagagtgggcagcttgggtgggtgggcatggagaatgacttttgttcccttgttggtacgtccaggattgactctctgtctatttcttcccctgagacttggctagttccaaaggacagaataacatgccttggggtagagtgggggctgctggacctcagacagaagcactgtctttccctctgaacctcgcagagagcctgatgtaccagggtataccgaggggaagccccgtattgctcactgatgttatcaggaggcttctagcctgcgtgccaggcaggtaaattgattttttttttcagtctgtggaacatctaaagataggcaaactggtgtgtgctgctagcattgagaatgacaggccatctgtgaatcacaagcccgcccactgaggttgtgcagggcccaggctggtggcaggaaggaagctctgctagaagtagccagatgcaggtgggtgccactcaaggattggggtgggggtggagggtggggagagggagtcagccttgctggtgaatctgggatccccattctggttcccaggaggatgctcagcggctcaacagtactggagctacagtagtcaagtgctgtgtgtgctgtgcagcttccgtagctggatagaacagggtagccccagcaggggtgaagcctccatgtggctctcttgctggttcaaaggcctcacatagccagcctatggctgcttgttttattccatgatgcctttctgtctttgaaccatttggctagttcttaggaggactttatgttttttcagggatttctcactcccctgcgcccccccccccccatacaggcaacacacaccaagttccttctaggcactgggcaaagtactagatacagcgcatgccacagaacattaggcagcagtgtgtgtgtgtgggggtggctttttggtggcaatgtcagtttctattaacctctggaaagacagccagcaaggtatggagtaatggaaaatatttcctgacggtgggaaaggcctctctgaggaagagatatctggaaaggaagccagcccagtagaaattggagggaagaatctctcagtagaaccagtctgtacaaaggtcctgaggtaggatggaaagcagttgctcttttcacactgcacagacacatctctgagtgaagtgtgcagcccatggtgctatgctaggaggtttccaggggctgtttttatagatctttgtaggcaacagtaaggaggttggctgtccatgtcagtactaggagcactgttggagggttttagccatgcatgcaacctcgttagagcttgttaaatctcagtctgtagccgtgaacctgaaaagcaggcaggacaggcatggaagcagaactccaaagcagaatactgcccggtcctggggggagggaatagaggaacaggggctcaggatcaaactgaagccatctcaacctgtatagcagccccactggaggaagaaacaggtcctcaaaggaccaaggacgtgctccagattgcacctatcatcttagcttaaggacttccttgtctttcttgtcttagcgtggggtctcaggatgctaggttgccttgattgtcagacaggtgttagcaaggagccatccctgggaaggatgactgctgtaacacggtacccaggagaggggctagaacagcacagttaccttcctctctctctggagtcccaggtcaaggtgttggtaggacggaagctgcattcctatgagatctgtttccttggctcataggtagcctggccctgctctctctgtgaagtcacatggccttctgtttggctcctcgtcccttcctcctaggacaccagtcgtactggatgaggatttactctagtgacctcgctttgacttggtctgttctttacaaacacattcagtgtctacctcgagagttaaagatgtctgcatatacagtgtggagaccacacccccggcgtgcctctccttattgagccacctcagtgggtggcatgggactcacacatgctgctgttgtcctctgaacactcagcacacttgtttagtttatctccaggacaatggtaggccagtgctagcagatctttgtgggtggccatgtacaagagtgccttctgaggaccatactgccttctgagggccagcagtatgaggtggcagatggggtcggcaaacacaacaggtgtggcatatgctggccccaggcagagagtgtgagcaagagccaacgcactgttttcatttagccatcggctttaaagcatgtctcctataatcacacagatgttgagctgtttatcaggggaggtggtaataaacaaagttattaaaaatagccaacaccatcagttatttctaggtgccaagactgttcctgaacattctgtgtcatatttatcttgataccacagaaattcagtgagcaggtgccacccttatgagtcctatcttagtgacagagaaatgacaggttgggaggggaaaaaaaataactcaactctggtccttcagccaggctctggtagagctggggtctgcaaacatcagagttcctgtcctctaactactatgcagtttgtactttaagcacctgtccccccagctgggttcccagtacttacctggcaccttacaaccacctttatctctagttccagggatctaacgccatcttctggcctatgtgggcacaacatgtatgtggtgcacaaaaatatgtgcaggtcaaatacttgtatgtattaaataataataaaaaaataaagaattttttctagaaaagaatggatgtttcaagttcttaatgagacttgatttttctgtgtgatgccacacaaggcaggcagacttttcttatggtcttgtgtttctcaaaatctgctccatcgatcgacaacttcttccttcagtgtggatttcttagaaaggtatattgtaaggccccagtccagctactagaacagatagtgacctgggacctgggacctgggacctgggacctgggacctgggacctgggacctgggacttggggtaactgactttccacgtaatttacaccctctctctggattgacagccttgccgggttttgacacccctggttcacagtgaccttgttgtactcccttgtgtttgcatttgtaagtctgaggctgggtatctatggggaacaagaacctgaggcacaggcaggttgaggacagaagctgtgtggcttcaagccttcaagtcagcccatgcactcttagtagctgacaggcccaaaggagggttaatgtatagtatatttgggaaacacaagttttccttagtgaagaatacctccctgtaatatgtaatccatcccctctctgtgtgtaaaccagaggtcagtatcatgtgtgtttcttagttgctggagagatgctgagtgattaagaacattggctgctctcacagaggatctgaattcagatcccagcccccacatggcagcttacaacccatctggaagtccagcatcgggagagatctgacaccctagcttctctggacactgggtgtacacatagtgaacatacatacatacatgcatacatatgggtaaaacactcatgcaaaataaaaatattagaaataaataaagcatgacattaactcttatctttctgattgtaaagcacacccatgtttcttgcaggacacccagaaaataagtgaaaaggattagatgattattatccagaagtcagaataataaccaacgccaggaaggctgtatgctggaaccctggctcactgctagtggagtgatggtagctgcttattatattaggcactgaattatcatccggtcccaaagtttcacagaaataaaaacagggatgtaaacaggagtcagggggaagtgggattgtaactgagactttggacgccttggattagcccgtgggcatgtggttggagcattcattttaaacttcaattgtttatcttgtgtgtgtgtgtgtgtggatgttttatctacatgtatatctgtacactacctgcatgcctgctattcatggaggctagaagagagtgtcaggtccactggaggtggagttatagctggttgtgagccatcatgtggatgctaggaattgaacccaggtctattgaaagagtagccagtgctcttaaccactgattcatctttccagctccagtgggcctttttcttcattccccatatccctgtgggcagagtcactcatgggcaggcgctcctgggttatgtaagaaagcaggctgggcaaaccgttgagcagcaatcttccttggttcttgcctctctctgtctctgcaggagcttgtgccctaactgccctctttatggatttgggggatggagagagatggctcttgggagcttgctggcccaccagtctagctgaaactggagccccagattcagtgcaaggcctgtgcttacagaataaggtggggatcaataggggctgagataccctgctgggactctggcctttgcatgtgtgtatgcacacatgacccacatgtacatgtatgcataccccatgacacacagaaatatagaggtgagagcaccaggtacatagccaaggtgatatgtacagatgttttatggtattttgtaccaccctttccttacaatttctttccattttgttagcagaacctttggggtgtttgtttgtttgtttgttttttgttgttttattttgttttgttctgttctgttttgttttgtgttttggagacagggtctggctgtatagtccaggttggctttaaacctgtgctaatcctcctgcttcaaccaggattccatgcatgtaccactgtgactgactttgaaatagcttgttttctttctctttctttctttcttcctttccttccttccttccttccttccttccttccttccttccttctttctctctctctctctctctctctccccccttccgtccctccctccctccctccctccctctctctctctctctctctctctctctctctctttctttctttctttcggcataaatgtagcaacaattctttttttttttaaaaaaattggttattttacttatttacgttttaaatgttacccccttcctggtttctcctctgtgaacccccatcccatcacctctcccctttgcctctatgggggtgctccctcacccacaacaccccattcctgcctcagccctctagcatccccttcttaactgtctccccatgatagctggttctttcagtgatttttcagtgttcattgtcctaggttgggtgggttgcagttaaggtctgtctgtgccttggatacagtcctaggaaaggagtccccagaccaaaggaagaatgcatttttaagatttcttcatcacgttgccaagtcgctttgcagaaaggctgcacagcttacacaaagcctccacccaaagtgggagagaaaaagcagccttttggaagggcactgtctcctttcttgaggactttgggggtggggtggggcgggtggggaggatactgagaaggaaaggcccatccccagccctgagagccgaggtgctgctgctgtggcctgaagcatgtgagtgagtgcttctgtgctgagctcggacaaggctgattagcgttcagccactggcctctctgcccacgggaaagaacagccagttcacaggtaatcccttgatatcgagctctggttccagtctagtgatttttatctaggctgattgcaagttcagccctggctgggccagggcgatgcccactcagccctcagatcccatttcatggcaagcagcagggcaggcccctctgtctttctcccgtataccctgagatgcaacatttcaaggaatgagagcctggtttctctggctcgttctccaactggacagggcgagaaaccaagtggaaagcaccttcatttcccattgctcttcctcccaagcatttgctcccccttgcgttttcaaaagcagtttggttgtgtggagttgaggtttgcaacatgactgtgtgagatctgttgaaacatctctggcagctttcatagtgacaaaggcaacttatatttttcattaaaacagaaacctttaatgtgtaagatctttaaaaaataaaaaagaacactggacataagatcttttcaatgtgtctactctggtatcctttgacctttgacctatactttataattttctttcacctcctccctcctctgctggaaaccttcatttaatattcactgtggattctagttctctgtctgtctctgcctccgtctctctctcccaccctccctctctcctaccctccctctctccttcccttcccctctctcaccctctccactctctctctcatatctatttgtgtgtgtgacatcatataatattttttcttgtcttactacacttggcatactgtcctttgcatccatccatgttgttacaaaagccactcaccctctgaaaaacagcagaagcccagttgggaacatgcttgctgtacaaacatgagtttgagccccagaattcatgtgaaaagagctggacactgtgcccatgcctgtgaccacagtgcagagttagaagcaggggagttcttgctgcttattgaccagcctggcctacttggcgagccctagggtaatgagaccctttctgacaaaaacaaaatgggtagttcctgggggcatgacacctaagattggcctatggtcctaaaacataggtctctcctgctccctaacacacagaggatagcaaagaggccagtgggaagaagtgggagagaggagggagagggaggagggaaaggagtagagagaaaaagaaaacaatttagaagttacatagaggttttttttttttttttaaagaaattttacttctttttggcagattatagaaataaaatttggcttcccacaacccgttggagaaatagcattctgttcttattttgagctgacagcctaaacattggtctgaattgaatggaccactctggaatgaagctctgtgatggttgtgggaggagagaggaagggaatgaaggctggaaatccaaggctgtagggaaacctttctcttctcttctcttcctcccctttttctctttatctcctctcttcttccttacttccttaccaaattctgtatttaaacaaaccctaatggtgtccatggcttctcttggtgaaggaatctctgacaagactccatcttttgattctggaatgttctggaaagatgacagacaggcagagtgagttaagggcccaactctgtcctgaggctccctattggtacctttaattttgcctgaagaaaatataattagccctccatgtgagtctgaggggttaaatttaccaagagtgacaagggggtggggctactacatttcccaaggaaatggtttttagggttccctcctcaatgtccagaccattgcagtaggcttccaactgggactctgactctcctgtcccaccagccagctgggctttcagaatgctggcatttcacattcctcattgatgattcttccataaggcccttgctagctgaagggaaacagaaaccccaggtttcctttcttggaagccccccccccaagggtcttcataatctcttcctgttttctctctgtctttggactccagcccactagctgctttcttctatttattgccccttggcttagtgagtacccttttgcttcgttgtttgcttagcttgaaatcccacttgtccatgactagctttccccaatagcttgattctgatcttcaacctctttattctaacaaatcagctttcctttccatagcctctacaccatttcctctttctcaaaactttcatctaaatgccttctgttcaggcataaagtctgtagactccaaccttgcttcctttcagtttatgaagccctggtcccccgtgagtgcttcacattgcaggataaggtacctaggtcagtaacctagaaaggttgatccattaatgacccatgactgaaggagtcccatgttgacaacttttatctccacccttctctgctgcttggcttgcagtaggcttcacaggcacctcctgttgtattctagcatggatctggattggcttaacccaagcacaaggcaggtagcgatacctgagagaggtagaaagggagatgagctgaaagactgctgactcagctgccaggccgggtctcttctgggctctgagtcaatcaatgagtgatggccacaggcttgtacaggactccagtcttctagatctgtacttctcaactttagagatccgcagcctggggccttctgggtaaggctcaaagacccagtattaagacagctcattttgctacagaaatagatcttctgcaaagcttagaaatggatgtgttttaatatggagtccactttaacacagcatggagaaggatgagattcttgtgcatttagaaaaatagacaatactctagacttttcctgcagtggaagatgcacatccttgcttccagctccaggctgtaccagaagctaagagagggatgtttattctttgctttctggatatgaatatgaaaggcatgagctggctgaagcctttttcagttgcgagtttccccatctccagccccctagccatggctgcttgggtgtaagatacagccggtggctacaggttagacttggaggtggatggagctgggttcagattcctctagctgtgcagacactgcaggccgaggacaaccgggggagggggaggactttaattttttaccttctttccaggagagagaaatgaatgctgaatatgtgataccactgtgaaaaatgcatgtaatttcacagctaggtccccgtgtcagcatcagcagaagaaactagctcttgtgagtcaggaggataacaaagacgggacaactgggaacaatttggttgatggtgatggtagattggaccccgacaaggagagcctttctatccagcagcctgtgccctgccctcctgtacctcccacaccttttagataaagtgaacattggcacatgacacgcacctcccgtgctgtctgaactgttaaattacaaaccccctaatgcagaagatagttgcaatgacaactccagtaggatgtgacatttctgacacttgatttcctgtagctaagggggtgttgaccccaacagccatggatagtctcacagggcctactgtgagtacagatgtgggaattaccagccatttgcttttgtagggttcttagaagcagtttcaagggtagttttggtttttgaaacaagatctcatgtggcccaggctgaccttgaactcactgtgccatcagggatcacccagaacttctgccttctgccttcacctcccatgttgggattactggtggatgttgtcttagtgtttctgttgctgtcaagagaccctatgactataaccactctttatcaaaagaaaaacatttaattgggactggtgtatagttcagaagtttggtccattattcttgtggtgggaaacatggtggcccataggcagacatggtgctgaagtggtagctgaaaattctaaatctgaatcagcaggcagcagggagagagagtgagagagtgagagagaagcagacagatactggacagggcttgaacatttgaaacctcaaagcctacccctagtgacagcacttcctccaagaagggtacacgtgctccaccaagaccacacttccaacagtgacagtccttgtgaggctgtgggggccattttcatacaaatccagttttgtggggtgatgggatcaaacctagggtttcctgtgtgatagggatgctctctaccaactgagctacatctctagccctggatggtaggttcttgagggtaggggaccgtatacaatggcatgcacaaatgtgaccaggtgcactgtaggtactgggagtggagcatatgagttggacacaggcagcagatccgacagtgccctcagtcaactggcaccagtgggtcttctcagaacctttaggaaataaaacattgtgaatttatgatcccattaacttaaaaaggagttactggacttttctggacccttattgaacctgtaattgaagttttggctctatggactaactctgctgagtgcatggacagactttacatagaattgttttgtatataagtgatgaaatgatcatacaccccaaatctggtccaatagggagaagtaacatgattgttctaaagatctgacccagtgctggggatatagctcagttagtaaaatgcttgtgtagcatgcattaagttttgggtttggtccttagcactgcataaactgaacattgtagtccgtacctgtaatcacagcacttaggaggtagaggagtaaggatcagatatctgaggttaaccctggcatacatagttctgggtctgggcctatgacttcttttcttctgaggaaaaaagaagaagaagaagaagaagaagaagaagaagaagaagaagaagaagaagaagaagaagaagaagaagaagactcaattcagaggtagtttttgtttggaaagtagattttattattacatttttaaaatcagaagtctgttttgcccttcccctgaggcctagagggtttagaccgatacactgacagtatcttaaccaaagaggcactgtgtcttctgctttaatagcattggcaggaaaccttgggaaattgaatggaaaagcctacatttcatgccaatggaatataaaccatcattattaatctcatcatttttaccaggtgccatcttatttaccttatattctgcagtcttggggaatgaacccagggtctcactctacagacgttctaccactgcccccaacccttaaaattaatatgtatatgtatgtgtatatgtttatgtatgtcattttgacacaaagtctctctacactatcctggcgggccttcagtagattctgtacagagaatgtttggccacaattgtgatctccttgccttaacctcctgcgtgctgagattagaggttgcactgccatgctccagtggttggacggtaggcccatgatatcagacataatcagttcacactgcattggagatgcttggagcttttgtacatatgatctcatacaatcctcacagtggcctaggaagacagtgattattatcattgcctttccccaggagggtaaactgaggaatggtgacactacctggcatgcccaatgcaaaggaagggtaaccagttgagggcaaatttgaactcagttaaggatttccaaccctcctctgagtgtccacagcatgctccacagagatgtgacctgtgggggttcaatgttttcttatagagcagactatatataggaagtataacaatatactataaatataagaatgtaggctgtaagtataaggatgatcaagtcagatgatcagtgggtaaatctggggtctcagtcctccagagaatctgggttgaggatggccaagggagaggaggaagtttacacggagagcttcctggagcaatgaactaggcacaaggatcaggtgggtagccaacggtagggacaggcattctaggagaggaaggaggagagaggtaggtggcttgagggctggcctcagtctccccatcttcctcggcatgagtgcccatgaatgaaggggtgccgaggtggattcccctcggaaaaatggtgcagcagagaagaggcacgtcagctgtcaggtgacacgtgggagtgtgtggggagcacgcctcatgattttctcttctcccaggtgtcttactgctgggttttaatggcaacactaggcaggcattggaagcttgcttgtgacatcagtgctgcttgaagcatctgctttgcttcctaggcatcttctagcaaaagaggtcatcctggtgatctttgtgggcacttgtagctatgtgtgtgatctaaccatggtggagcacagttggcggctgagaaatccatgccacaggtcagacacgaattgcattcttatgagtcagcttccgccacacagataatttgggtttaactaggacacacctgacctcagtctgcttacaggtgcagtgaacctgttgtgtggtctcagcgtcagtctgccctgatcccttcctatgtgggtggtagtgcctgtttatcactccttcagccagagtgttacagtgagatgctcactgacagctccctctgatttctgagctcagggcagagaggaggagccttgaatgtaacggttctttccctcccacctcagtgaaccctcttctgcaccaactcctccatgcccccggaggatgtgccacctctgccccctccaagttcatttctgtgtcagggctggtcctttgcctattgcagaaaggcagtacaagaagcctctcagatagggcgtggggtgataacttcctgtcctctgaagagaccagcctcagtcagggtaggacactgcagatccactgtgctgcaagtggggaggacctgggtggggaggcagagatagaggccgtgtgggaggggaaagaggcagagatgacaggatccgtgagtgagtcaccagcttcaggctccagctggagagccccggggagggggaacaacattgcctaatgcagcaggcaagggcccagcttgggtctgcgatctgctcttagcgtgtgtgtgtgtgtgtgtgtgtgtgtgtgtgtgtgtgtgtgtgtgtgtgacattctcctggggcatgggcacagaggagtgatctgccttacacttggaaagcagagggaggtgtaagtgagcactcatactacaggcttgaacgaaccatccacacacaagaggaaggtgctagtgttggtctgttcaggaatgaagaatctgagaccctgcaaggctgagcaaatagaagtcccgaacagtggtaaaatactacatgacttagctctggccctgctgaagccttggacttcatcaccgcagatggttgtcagcccagagccagcaccagaagcacctgggtgctggttctagaagagtctgagttatgcttccatgtgagagctgtgccaaggtctgaggttccctgttctgtactctccttactcagcttcctggcccagtttctccatctgcaaaagactctaggagcttggcatctctacatgttctctccagaccactgcttaattgagtttcccacgaatggcatccttctcaggcatcacggctgtatctagtttgagaacctagtttaggaaaaacagcagtaggtggagaacattcagtggtttttcttttgtcatctgctttgttggtgtggaaaggccctgggcttccagatactcattttggattgtactcttattgatatgaaacaccctgcattctcttatgctatatattcattggaaatttctctctgtgtgcatttatacataggcatatataatgtgcaacacatgtatgcacattcatatgggtgcctaagtatgtgtacagctacatcatgtgtgcacagatatactcggtgtgtgtgtgtgtgtgtgtgtgtgtgtgtgtgtgtgtgtatgtgtgtgtgtgtgtgtgtgtgtgtgtgtaggacagaggtttacttttggcttggttactaaggtactgcctactgtctccagcttgattgaggaaggctttcttatgagtctagagcttgcctggcttgagcagcctggctgggcagtaagctcttgtcattgtctgcccagggctgggattataaggcatgtcattatgcctggctctttatgtctgttctggggattgcttatcacttatgattttgagacagagtcattctctgtgaccaggctggtctcaaactcttgaccttcctcctgaggctgtactgacttgtgtatgctcctctaccctgcttctacaccaccctacttaatatccattgccctggattttactcgccttgactctagtgcccccattctggcacttagtttttggctggcatattttgggctattcttttactttcaactttattttattgtatctgtgcaggatacaggatacatttcttacacaaaacacataattgtatgcattaacttgctgtgtattattctatccattttatacttcataaaagatgtcatttatttttattcttccagctaatacattttgttcctccccctttaaatggttctctacagcctccgttatgtctttgtaatgggacattttaaaatttcatcttatacttctctctagcaaatggcaatgttggctctacctgtcttgctccttaggtgtgaggggtagtgtttcgccttattctgctggtggcttctgcacagagtgctcttatggcttttttctgccacttcacctctgagaacattacaattatggttgtgctttactgtgtgggctgatattttaagcctctattgtataggtattagattgtatttattatttttatgatctcatcttctcctaagtcttagctttcgtgttcattgttatttgtgatttgagagttatttaagcttaatgaaacttcaggctcatggctaaggttttgttctgtggacacttaggtctgatcagtgtcttagctgtgcatatagaacacttaccacctatggaacattctggaacaattgctctgattcattgctctttcctctgcttttgtggcactgctagggatggaccccctccaggtgaagctaaccccctgccactgagtcagaccctcagcctctacatttcatttcttctaaggtttacaacagtgtgtggctccacagctgtattttgtgaattagtcagactcaaactgatctttcttcctttcaaaggttaactgacatcttctgcttgggtgctgtggaacgccaccatggagtcagcagacacatctgcttaattgtatggctgttccttgaccttcacagccaggtctaccctatggtctgaaaagtggttttctggttttgttttgtttgttttcgttccccccacttagttcggtttataatggtctggctgtctaagtctgttgagtatgatctggaatccagctttctcagtggtctgcctctctcagaattcccctccttcctctcgggagtatttgtgtatcaggtttcaggagcaagcagccctggctttggctactgacaggggactcaacgcttgagtcctttgctgaaccctgtgctgggtttcttacctgctgtatgttccttcttgagttggtagagtgaggctaagagtcatgtgacttggttgtgctcactatggattgaaaaatgtgtgctgagaggcctcgccttacactgccccatccaggcaccaagaggcaggtagagcctgtgctctggctgtgaccataagagggttctctgaagtcattcttttgtttttctagacttatacttacttatgtgtaggtatgtgtgtcgtgtctgtgtatgtgtgtgtatggaagtcagaacagagtttcagatccccttggagttggagttacatttggttttgagcagccaaatatgggttctgggagctgaactcaggtcctctatgagaacaatgagagctcttagccactgagccatctctcccttccctgtttgatttttgactctgtagtccaggctatcccagaactcactgtgtagtcaaagctagcctccttaaagcagtcctgctgagatgacagggtgacctctgggtgaccaacgaagcagtcatcctgttccaatcctttctttgagttctgtgttctctgcttggatgtttacaaatgtctttagaggattgatggctgctttttgtggcttccatcatgaacaccgtcatggtttgcccacagtcagggaaggctgactctcctggacctctttgctgttcacctcatttcaggagaacactgtgtggttctgccaccagatcactggttaaggaaggcatctcacgtggttcagccacctgtgaggccaccccagagagccagagccatctgtaattccagtgggagctcaacctcacaacacttttctgacttggtaaagccactgctctgagtgccaactgttttcctctggcttgctgtttgacttggccaccatgccaggtacaaactgtgctcaaacttgtcctccttcctggagctgccacctgctgtgtcagggacaggccccttatcctcagccagtgttcttctgatataccagccatgtgattcttggggcttcccagttttgctatacacatacacacacacacacacacacacacacacatacacacacagagagagagagagagagagagagagagatacatactggcagacacacagatatatctggacatacatacacacacacatatatacacacagagatacacagatgaatccacacacacccatacatacattcaaacacatatgtacacacacatatggggggagacagaaacagagacagccagagacaaagagacagagacagagagacacagagagatagatatgcagaaagacacagatacatccacacacatgcatatatatatgtatatgcatatatatatatacatatatacacacacacacttccagatacacccagacacccccgacaccccccctcacacacacttggatccacaagggcaagaggactcttgctatgactacttctctcccctagcctggtttacctcctttggcaggtcttacttatctgggcagctctgttctttcttagtcagaaaggatgaccaaggtagccttcatcttctttattcaaacatcatgctttttcttttatgtttggggcacatggatggcacaggtttccagcgtcttaggggtatttcaggctttctgtcttcactgggcaactgctttccttggaggtttctcagaggaacattctagatgtagatacatggaagcttagctttctcatctatcatagatctttctagaatgcagaagctgagaggttatgaatacttgctagctaatatgcttattggtccatatcaaaaagagaaagtcacaaaaatgtgtgccatgtccagcccttgggtacccaccaggtcctgaagaatcggacaccttaatcttggaccatggagcagcagaagtgagagacagtatgtctgagatttaaactaccctgtgtgcatacttattgacagaacccttacaaatgaacataccaagcttgcaagaagaaatccacatctattggtatcagaagatctgtatgatccaggccctgaactgtttggaaatgacaaggctgcttagctatgtgggaaagtgctctctgagctaccaggactctaggcagcttctgtaggcagagcacacaatttgtggccttcctgaaggctgcagaccttccttcctatgtttttctctgagcagctccttcccaacttccttagatggggtcacgaggatgtggcattgagggtgcccaagacagacaggaatatgagtgtcaagcccagcaggcatcaggaccacccttttgcagagccttcctcagtagcctatcctgctcaacttaaggcccggaaaaggcactggataatgaaatctgtgactttgtttttgagaagatacccagattgagcagagggtgcctttcaaagtcaagcacaatgtgatgagtctttagcactgtaaacctctgccttgaatgccttatctgacagcaccccccagtctggagttgtggttctcttttatctttattttcttgtgtgtgtgtgtgtgtgtgtgtgtgtgtgtgtgtgtgtgtgtgtgtgtgactgtgtatgagggtatacttgtctttagggatgcttgcatgagtgtgtgcagtgtatatgaatgtgaggatcagaagttcacatcagtcagttgacttccccatttgctttatttgctgaggtgggctctcttgctgaacccataggtcactggtttggctggtctagagccagcctgctccaaggattccttgtctctgcttgtcaagggctgggattataggctgccactcctgtgaggcgtttatatagatgttggggatctgcacactggtccccatgcttagacagcgtgcaccttaccctctgagccatctccctagcctgtgcttgtcattttggaacgttagctgctctagttgatgtctgcactcttagatggccaggctcctctgtgagtaggagaggagcatttgcttgggggctgtcttcctccaccatctgcagcagaactgtgccaggtgtttactggcactgcccagagaaggtatcacaggctttgggatacacaggagctccctggcgtgtaataggttagcaggaaaatgttaaattaaatggcctaatcacatcggagtttgctgatccctgcaatgaatgttcccagtggtgctggtcttttccttggccaagatcgtaagccactggggtcaggcatgactctcttccctcagctcttggcctctctgctctgggttgggcacactccccttccagcacacctatgttgattgattggtatggtgttaaacttttggctttttgtaggcaactgtaggagggtgttgagctttacaaatctgcccagtgcctaaaattgaactacacatgtaactcactcacatgcatggctcagttggactttcctccccccttcgtgctgcctccagctcacgtcccatgcctatcaggctgggctgctccttcatactatggtgctgccttggctggctggaaccggatttctgacctttgggccttggatctctgtggtactttgttgtcatactgaatggcagtgatgcctttctaagtgtcctgccacattgcttctgtattttaagaatgagacctgcttcttttgagaagtgtagagagagatgatgggccaagggtttcctggaaggggctggaggtctttagcccacagtcagtctctgtagtcagccagccttgccagaaacagttgttaagtatgtttaaaggacccagctcagtgccaggagcagcggggaatctgaagagctgatgagtttgcaaagacaagcagcagagaatttgggttaataaactcagacttgtgtcccaactgtttggttcaagtttccactgtctagcattgaccttaggtgaacgattttgcttctctaagcttgattgctctgtaaatttctacaaggactttcgagcatcaaataagataatgcatgtgggatgcttcagtatcttgcctgctacattgtaggtgaccaattagtcgttctcaaaacacaccggtgcctcacctttactgctgtgtgccaggtgctggcaaagaggttttgtcagggtttgtgtatccactctgtgtgggagcccagaaaaagacaaaggacaaattggctgtgagaaacttacctgaggtggagaactgggttttaacccaggcaatccttctctgaatttgtgactttagtggccttgctacctggtcttgcatagagaccagcctgcaaggaagctccatatagaatggcccagtttcctcattcttaaattccctgggggaattcattgagttttgtaaaggattttaagtgatgcctggcctgtgttaagcactcagtatctggcaggagtttctatagaactagcttcacacagctaaaagttaaggcaggtcagtggtggttgctatgctccattaatcccagcatttgggaggcagaggcaggtgggtctctgagtttgaggccagcctggtctacatggagagttccaggacagccagggccacatggagaacccctgtcttgaaaaacaaaacacttaaataataaaagctatcagatgacccagactattaaagcagacattttattttattgtacatgacaattcttcatccttcaggacacaatgtggtgtttaatacacataaggtctttatgctgatcagatggaggtgattagcatacacatcatcttaaacatcggccacttcctcattgaggggcattcaacagcccatagcttagatatctggaacagttcattgctgctctctgcagttaccatattggacaataggatgccatagcattggctaacaggcacagatgttttatgaggggagtggagctcagtgggaactgagttctgagaggtgggaagacggccgggcattctctgtgaagggtttcttatatgagagaaaatggagagccaaaggctggtgttctaggagcagagtctgagtagaggccaggagggattgttgtatggattttgacctatgagcaggtcctgagagttgtcattagcaacctgactgtcatggatcagagctgtttcggcagcccatcgctgcagagcagagcaggagccaccaggatgacagaggtggtgagccacgtgaggtggttgctttttccctccatctaaatggggcttgggattattctgaggtactagcccttggcccctggaagaatccagagctatgggttaactgcctttcagctgctgtttatgtcataaatgcctgtcacacgaggggccttaaaaataacccggtggctaatagcatttctcaaaataactgcttgagaagtgctttgctgggctgtgtggctactaaaattacactctctaccagtggggatggtgttagtatgtgtatgtatgggttgtaatcctgtatttccagggtgagtcccactctttattgtcttttgtcctgtggtccctcttgtcatggttctgtgtccaggaatgatgccttctatgtcactgtgcagttcccttctctgccccatggctcttggcatattggagaaactctcctacatggccttgttgtcctgcctcaaggagcagagttttgaagaatcttggagggcggggtggccttattgtggtgctggcctgattccttggcgtgccaggtaataatagcacaccgtggggggcagatctcactgtgctatccaagggggaaactgggccacagaacagcgcggcagccccactcaaggtgacctagtaagtgaaggtgtgaacacttgcattgtcagagaggagctccaggagctcttcagggggggtctcccaggccaatcctttgggtcacccagcaaccaggttactcaagctccctccctacttgcaattatatccaaggggatgtggaaccctacaagctagcccacaaagccgaggagcagtattattaagagtttggggtgaagggctgaggtcacttgagggtggtagccagtttttctgcaatcattgcttacatccagaggggtgagtttccaaggggagtacttactgcaactgacatttcatcgtatgggtccctgctgtggccttggctctctagcaggtgctggagttacaaagaggttcagggtaatacctagtcagggaacatttataagttagtgtgttgtctggacacctagcttaggatgctgtgaaaatgatctgcattcagcaatcactgtacttcaaagttttatcttttcccaatgagtgatatatggcatgaatctgccccatggtgccaggcagcagccatgagccatagctcttggtgtggccctgaggcgactcaatcatctgtactgtgattatctcaatgtccagtaactgatttaagtccagcactctccagacccagtgcgcttttatctatattaatagtgtgtgtccactctgggcttagattcgtgtgcggtgttccctgcacattagatagccagcagttactagaaaactggctacattttagatgattctgcccaagcgtgagtggatgtgtgtgttctgggtagctgaaatctggctatgataagccccactgcttggcagcttatatatattatgtggcatttttgcatataatattttttatcttctgatggctttactgagccatggccctgtcataaataaaggatgtctgtgtgtagcatccttatgacaagtggggttcttggtatggtaaaggtgccttcaaaatgtttgctggaccactgtccactggattcgtatagttctggagaataaagcccacccctgagattttccccagaatgggaaagcaggaagctcccagatcctgctccccccacccccaaagctgtacatacagagcacactgctgtggaaagagtctagtttctaaaattaggctcactcggtgactttagacaaagtttttaacctctctgaaccttttcttcaactgttaaatataatttggcatagcatcaacctcttagagctgttgggaggattaaatgaccctcattagccaggcacaggcatagctgtggcagcaccctgaagatagctgccagcattgtcttcacattaattgtgagcccgcagaagctggctttgaagcgtatgtcattgcttctcatcagggtgttggtaatttcatgtttgaatattgtcaagcagcggctgggtgaggctctcgaagaattggggctatttactggggcatgggctggccagctctggaatgctgactgaggaggaggtgaatcaggtaggggtacaatttgtgacagattgtcatgtaatcagaccttggtaattcacatcttatatcaggctcgttgtgagagttcaagaattaagaggaatctttcccacagatctgtatatacacgccaggatatacacctactccatgcaagggttcctaagtaggtgtaatggtcacatggtgtatttggcacagttgagtggagtactgctcgaatccaatgggtgagaaactagggacagtgttgttcactgtcccatcatgttgagacagctggcactgtaaaggaccccctggaccaaatggcagcagtgttgagatagaccctctatctaaatccaaagatggagaatagatccctaagggaagaggatggcttgctaggatgaggaccatctctgagtcagggctgggacacaaagataaagctaaatacccgagtttaggacttcttatatttctggaagcccctgccccattatggaaaaagaaaaccaactttccttacatccacgaagttttactctaggtcactgtccaggccttttctcttgtgccttcccaagatctattctgagaaggacagttcttgctgttcctggcttgctaatagaatgcagtttgcagaacaaggagataaaagagaagatgggtctgtcttatttctgtttcacataagtaagatgtttctcttctttgttgtcgttgcttctgttgaagtgatggatggtagccctgagaggtgagtagttagccaagctctgggttggcaggttcctaggggagaagctggcccaccatccatggtgggccaaatggtctgtaagttgagagggtggtgagtagtccctttttataactggaggatagttcaagtgaagtgtcagcaagtgacctgtgtccctggaacactagagcagatggaagtcatggcaactctgttgctcaactaggagcagagtgacctctcttgctgacttccaggccataggggccgagaaccacctggttacaacaccttccaggacagggctgctgtcgccatgtggctcttgaggttgcagcttgctacaggggacagagctggacagccagcagcagctggtccagaaggagaggacagtgcagggtgatgctccctcagtgctcaagacagctcctgctggccaatggaatccttgcatttcctgcttggtcttctatgtgccttgcttcctcagcagtccagacaatgggctataaagtgggcagtcaggaaggacctagcagtttctgggcaggcccctctcctgagcccgctcaactgtgcagacagcaagatagttcctggaggagctcatatctgtagccactcctgaagaacaacttgctgtgtaaagtctcagcctggtagcgcacttacttctgttggctcagacttgctttaagaggggatttggaccaaatgcttctcaacattctgatgcacacaagatggcttcttggaggattcatcatgctacctgccatcttgtgactatccatatgatgtccagtgtctgactgtcattgacctttatggagtagatgtccaaacgtgagggaatgagtacctgcagaagtcaagcattttaaagaaagtgtctgacagtacaggacgacatcattggcttttaggtctaagtagtcacctacactgataggaggccctgttcaaacactcagaatcaccctgtgtgtgattatcaggactctctaaaccatagatctgggataggaatggagatctgagcatttctatttaatttgcatatacagctactgccccaggaccatggtttgagaatgaatgccttgagttattgctcttttccaaatgtcttatacttcaggttgatggatttaaaaaaaaaaatcacaggatatgtggtgtgtctcttgtactgaattgtgatgccaaattgacagcactggccccaacagtgagggaactgcacactgaaaaaggttggggagtctggcggtacacacttgtaatctcagcatttgtgagataaactcatcacaccaggcattcaaggctagccttggctatatgatttgaggtcagcctgggctacatgagagcctatttcaaaacatgaaaaactaaaaacaaaacaaaacccctcaaaatcccaaacccccaaattctgacccaatctaattgcttttactagggctttttattaaagatgtaacacaaaatggaaatataaggaggagttcagtggagcggaatccattgatggacagtgagatgtccctatatctatccccatctttgtttcccatgtgacttgtctctccaggtgacctatgagactgaagtgaatgcttaatggtgggaattcagccctttaattctactacatttttctaattctagcactgacctgcaaggagggaaccctccccgatcctaccgacaatgtgctacctgaggtttggggtaatattttacacacagggcttcttgagaccagcatctttgctcttaggaggctcttttccaagagtcttaagtcatcctgagctaatgtttagctgggggcttgggcttgtcaccatctgagaggatagttcctaaggcagaattttgtctttggtacttggaggctggggagccaggagaatctccctatgacttgagtgcagtactgagttctagttgaaagctgaatgcagttctttctttctttctttctttctttctttctttctttctttctttctttctttctttctttctttctttcttccttccttccttcctctctctctctctctccctccctccttgccttgccttgcctcccctcccctcccctcccctcctctttctttctttctttctttctttctttctttctttctttctttctttctttccttctttctttcttcctttcttttatctgaacagagctgggggaagctctcaggcttggcctggcttgaagcttggctttccctcactctctcctcccatacatccttggcttgctttgggagtgacaggtcggagcagtccccagtctgtgatactggttttaaaggctcactagtgtgaaagtgctaggtgtaaagcacaggccctttaaaaccctccaggtgcgtgaacagatggaagagggcaagagaggctatgaacagtggggctttgcggagcgcattctctaaggcaagctgtcaaagtgtttgtgtgaagggcttcctttccagaaaactttgcaagtcaggtgggcttggttctattttaaagacaagaacactgaggctgtgggatttgagaagggcagcaagaggttggatctgatagaaggttctattctgctgtcgttgatggaggcaggaggtagagggagttgcaggtgatctggaagcaatgttgtggtacattcatgcttattctgtctcctgcatcccagcttcctttagaccatctatcccaatcagttcagcctgccttatgtcctctttccagcatctgtttttatctgatgttgacatttgatgtactgaataccttatttttattgttatatcacttctatcttggtaggattacatcaccctttagaacagtggcctcagccttcctccagctttctttgaacaccttacagcagaggtcagggtcagagtggagctgataaacactccatcaccttgctgggtagatgttccacacttgacatcaccaattgctccagttggctggagctctggactgctaaggttttagcatccaaagcctggcatattggaagacccctcaaccctggctaatctaagccatatggtcactgtacctcatctggcagccaaggatgctagtgtcctgggcacattgtattacctgaatgttatctattattactggagaagatcccagagactacttttcagtctctgactcagtgctcctccatgccctctgaaggagaaaggactccatctcctcccgtctgcctttagatgacaggtttttggaggtaggtgtcatctttcaggacacctttatgtttctcatcttctttggtgaaatgattctatgataagcaaaagttggctcaaaatctgtaaatgcaatcattggctttgaactcacagcagaggtcaagaccagggtggggctgataaatgttcagtcactggacattgccaggtatatgacccacacttatagctaccagttgttccacttgcatctaaagtctggcatcccaagggagccttagattggcatcgtctttcctccaggggcttaactaacaaggaagaaattgctttgcctcaaccaaaactgagatgttggtccctaggggcaaggggcagttcacaggctgtcacagccagtccttagaaatagcagcgctgaattcttgtctagcagtctccaaaatggggtggacaaggctgcctttcagaatgtagaaaggaaatatcagactatcaattcagatttccctgttcttcccttgtggacttctgtgatggtccaggtcttcttgcccagaaaataggagtgataccacccactgatgaggatcagacagcatagcacctttaaagcgtcctgtacttgaaaaatagcagtcaaatatgagaaaatattagagtcatttaaaagtggtttctgccatgttttctctagaaaatacaccctctgtgtagaagtcacaggaggctggacctacaggctgggactctttgggcttttctgtcctgtgagtcacagtcttccctccctgtggcatgtctgtccctgctgtctctggtcatcttcgggcagatcctggcttagcttgtacttccccagtagtcccacgttagtcccttatgaaaatgttacataccattcaagaaaagcccttttggtttccaggatggcaacaccgtctctttctgtcctttagccattatgataattgcttaggctgtagtgccaagacagcaaataaattgcctgctctctctgacatcccagtgctgtttttacatcatgaattgtcccagtgcggagataatccttgcttgtaatttcaccagcttcttaagtgaggaaaatggacaaacagctttctgttctccacacaccactcccaggttttccatagcgggatccatctctagtaagaggtccagacttgccagtcctggctgctagaaggttgctatcaggttgctgtctagattttgagtctggagggcccaagaggtgagtacaatgcctagacagggtggggagatgggggcaagagagtcacaacccccagcttttcttgaggatgggagcatgtgacttacacacaactgcttccacaaacctgccttacacacccctgcccccataacacacctgcctccacaacacacctatctccacagcacacctaccttcacaaactctgtgctaatgaagtgggtgtttctgctaccactatatctctctattaagctactgatgaataagaatggggagaaatgagttgaggtctgcggagacgtttctatacattgctagaaagctacggagacattcatttcctggaagagttggagggaacagggaaaggagggttggggcagagagattcctcttaaactgttccatttccaggtgattaaaaagacattaaagctgaaatgcatgctgactgctggcgtgagagtttcctctatagctccttctacacccaaactgtctgggtggatgttgatcagattcttagataccagctgtaccatggtagacagagtaggaaggagagagagggatgggggatagagggagagaggggaagagaggggggatatactggcttatcatggtagacagaataggaaatgggagatggagggtaggagggaaagaaagacagaggcaggcaggtatacagacatacaaacatacacatgcacatgggagtaggtcatacatgtcaatcgttgaatttgggggtggaagagacagaaattcttataatttaacttggaggctaatgaaagggctggagattctgcagtggagaatcatggctgggtgggactcatggcctccaagttattcttggttgacttccaggcctcaaaagaaactcatgatatgcaagaaagatgacctttggtggctgggaggtatgctattggaagggtatgggaagagcttgagagtggtcccagaagggcaggtagtccttccccctgtatttgtgttttatagcatattcttgtggccaggtggctgagaagagacaagagaagagaaggctgtgttcttctgaagaaggggtgcttgtggggcttggctcccgccatgctcggtgacaacctcagcttgctgtccccaaatcgtaccttctctcatgccttccattaggaatgtaagagacatccactgtaaactttagcctggtatcccagcagcagtgtctcaccccagggaagaggcagcatgctgcagagcctcctcgtgcctgcacttctggattccttggccagctgctcttctttcccagggagggtagcagcctccccgagagatctcttcttcattcactagagccataaaaaattaaactgcggggttatcaaatattaaatctgtctgatgaatgactacttgcagattcttatgaattctttgctttgattaaataaaagtgaagaatgagaaccatctaaccagcagtttagcaaaagacaactcaggcagtccttctgcctggccccagcttctgcgtcctgtagagttactaggctcacagttcgcttccgaggctcttgatactttgagttttgtacttttctggaattatgattaaacaaggcagccctccgaccgatagtcccttagtggttttgaaaactctgtctcagtagctcccaactccactgttctcagcctcgggtaagcccctgatctttattctcaaacctatgaaatagaaggaataaggaagatgccagctcatctgtatgattagtgcatgcaaaagacaccaaatgactggcatctggcagcaagaaggtcttaagcaattgctaatgttattgttgacttatttccaaagaattgtggttgagttgagcttcactttggtctttcctgacccaatgacaaatgacaagtgccttaatttgtttattaatccaaggctcttaggtcccatctttagtgggacataagaagtacaacaggtcaccccttacacataaggaaaatgtgctcttagcagaagagcactgtatatttgcatacatgtgtattatgggctcatcatacaaatgcaaaaaagtggagaactgtgggcagacagggtcatcagggaagctaggagatgaaacctttacagggtgggtggtggtctaggagaggggaccttcacagggtgggtggtggtctagagcctctaagaaatctgcagcagccccagaaaaacttagcccacattgttgtttgtactctatttcccatatgtagcatggggcatgctcagacctaaagaatgtcatcatgaagaccatgtgctctccccatagctgtttctgtcgaattgtttgttcctagagagtggactgtctcctttatcgcacagtgcttcagtcgcctcataaaaaacacaagcccctcctggccgccttgggctcagctggagttatgtggctctgctggacctcctggaggtcctgcatgtagcatgttcatataagaggtctgtgacttgcttttacctgtaggagccttggttcactgtgccagaccgtcaactgcagattagcaactgggataggatccctgcagccagatgggagttgatgtggtcaggctcttcctgtctcggacctgtagccaggtccagtgggaagtaagatatacttcctgatttctcaatgccctcttgtttattagtcagtggcttatcataaagggggacaatgctaacagcacaggggacacacattagtgtcttagctggcaaggtcagtgggtccttgcagcttctgtgttaattttcaggccaagatgctcataagaccattgttctctttaccctgctttatcagataatcaatgagcaagtgtccccaagacctgagctggcaggcatttaagaaatctctaggtggctctgtgggaaacctgaggaattctaagacatgggcactccagtcgaaggaagcaagagagagagagaggtagacgtaaaaggttaaccatgtcctagcatggaatacaagacccctggggaacaagtcagatagcaacagctcagcagaggggcatggagtggcttttgtccatggcaaagatccagaacaaagagtgactagctgagggccacaggccatggagcaccttatggatggggggtgggggtggggcaaatttgacaccttcactacttgtcttgacctcgaatagtcttagtttctagttgtctcaaacaggcccagcggtgtccacctcagggatgacaaggatttaatggcataatatgcacatacagaggtcagactgaattgcctgacagggacatgaccgtagtttatcactgttgtctgctgggttcaaatagtctttcagggggctcttgaggtacagactgagccatgtcccgcctcactcactttgctgacccattttatgtcaacttgacacaaaccagaatccttttggaaaagggaaccccagttgagaaaatgaccgcgtcagattggcctataaaccagtctgtggtgtcttgtcatgactgataattgagctggggagggcccaggccattatgcatggtggtgtccttgggcttgggtgctataagaaagcaggctgcataggccataagggaacaagtcagaatgcagccctctgtagcctctgcctcagttcctgcctccaggttccaacctttcttctgtcatagactgtgatgtggaactttcctccccaagtcgcctatcatgtgtttttatcacagatatagatactctaagatactaagatgctgggtaaggtaagggtgaggctttacgaagaggaagattggctggcccctgatccttccctaagtgcattttattacagacctgctatttacctagtactgggctggtccttggcaccggagaccctttgcctgtgttcatgcttcacatctctgtgaccagctgaatgacactcagagaggcaagtgatctgtctctttatgaacattaacaaggatggccgatgtccattcacattcttttctgtttgctgtgtgactgtcccattatttccaaaggtcccgtgtgcacactgggaaccacgcccagtcaacaggaatgcaaagaagcagaaataaataatccttcccgttcatagcagaaacatctaccgttttttatgctttgctttatttttctctccacattgttactgtgtcattttctttgtaatgttgagatcctagagtgcatacagtgtggtgttctgctgtttctattgacgtcctctggtaagcagttccccctgtcactgggactctattttgaaatgctaatatagttataggtactcatcccttttctttatcattgccttttagtggtttgtatttttttgggggggagagggagctattatgagtattaatgcactatctttttccagagttatacacatcaccccatttgctcattgcaatcctgagtgtattcagtgtgtatggaaatgtgctttttaactctaaggaaaatacttgttgatattcagccttggcattgagacatgggatgtaaaaccatctgacatagcaaaaaggagcaaaaaggtacataggtgagatttaacatgcccagttttgcgatgctgttgtctccgttaaacatccctggctcatagtaagaagatgggcaggtgcatctggtctccatctgcatttaaacttgcgaggttttgtagctgacccccacccctcgtctgtcgttccaaccacaagccgtaggatcacttacttaaggatccctctgctctcgtgactcacccaggctgttggtttgcagtcttccgggggcacagaggaggtttcgcatggacttggacacagtctgctccctctcctctcagtcaggatcagagtgttcatttactcggctctccttctctggggttcactacagcctgggcctgctgacaactggtatggacaccttgtagttttataaaacaatgagcagagcaattaaggagagacagattcttcactgaatcctgatttgccaagtgagacttaacatttttttttctgagacagggtttctctgtatagccctgactgtcctggaacttactttgtagaccaggctgtccttgaactcagaaatccgcccgcctctgcctcctgagtgctgggattaaaggcgtgcgctttttaaaatacagttactacttggacgaataaaggaactcttcttatattatgctttaattaagttcagagaacatattgtcctgagcagatataaaggcaggaagtagagaagacttgttaaaaatgtcataggatttacggttgcagggcatttgctatgtgaaggaacatacttagctcggtagttctgtataatagtgtgcagcaactgtgagccttggatgatggacccagactttcatattgttgttcacagatcataaacagcatgcttgagaccacctgacacacatcaacagggactgagggacagctcattttcccaaaaatagcactttcttgctaggggtatgtcgggctttcctgcgtgaaacaacttaattgtagtgttttaaacagaaggggtatgggtcatgggattggtaaatatatctcactcttatcaccaagggggtttaagatgagtgtgggaatgtcacctgcctaggtcacaaatgaccaagggtcattctaccattccttgctcataacagagatccttcattcatctctccttctgactgagccaggatgtgagccctatatttattcttttttaacacattgctttagcagtacttatcatacatcagagtccatttgcttgccattgtaggcacaggagatgttattttggctatgtatcatggtgtggggaaaaacaggttactttctagaagattctttggcaagcataagcatgataaactgcctttcctacatgcttgtccaaagagctggatgccattaaagtaaggttcacctgtataaagaacacaggtgcccttccagcttgcagccaacaaagtgtccactgggtcatgcgatgatgatgtattatgtcatctgtccttcacagaaagcctgttatgtttgattgaatgttttctattgtgccatttatgggatctacagtgttgggatggtctcagtagaggctgagtcaagatatgtgatgatgcagaggctgagaatggtctctgcgatgggtcatagatgtcaaggtcagacacgttggcctgtaggacacctgccatacagcacaaagctcttcttgagacggtaaaggatctgctaactttgatcccctgtgagttactagagggtgggtctgtggcttagttgattctgtatctttgactatttcaatctctaacagctaagaaattcttgaaaaggtatcagtggcccacaggtcaggagaagattcatccatcgggcttcaggcactagagcaacagctaataatatcattagtccactagagatggtttcttccccccaaaaagggccattataagtctttataaccttacagacatcctaggagagcagacatgattacctctacctagcttctcgtctggatttagagctgcctgggtcctgagtaatgggatctctgtgcagaaggcctttgtctgggtagcaagaagaagaaacttggagagcagagactcccatactgggccaacatagggcagggtcacaggacagagacaagcactagcaggaaggaatggggcttacaaagtggggatgaattgcatttcggcctgcaaggaggatggggaggctgaacaggcatggctccctgtcccctttctgagtctatctttgttttctggcttacaatgcattgcctttgggagtggccttttgacatgtgctaattatacattgtcctttggttcatttgagagttctaataattagaatttctaattccagccttttgagcgactcccagcagtctcatcctgtgagggtagcagtaagttcactggatttcttgtccagagcaggaggcccgtttcctgtgcacaatgggaagctccgggttcaggagtgcgagtggaggtctctccttgcagcccagcccagctctgccaggagacctggatctcagggctttatattttgtaaatgaggaagctcctcaactcaaaactacaaatcagagtaatctgggaatagaaaacatcctggccctagcctgccaaaggcttgctgtggcccccgagcaagtgacattttgggcctcagtttcctggctaaatactggggtcatcagatctgtgactgccaagagcggtttcaatttggagattatttcaacccaccaaatgttcaagtggtgtgttctgggtcattgtgttgtgattctgccaattctcactacacgactttccttttcaaattatttggtaacactatattaaacatctttgttctaggtcaaggtaagattcacagggtcattttttcccccttacccaactacattattttgcctagcttccctcacccttagcttcttcatctacaaaatgggcattgggactccttagtggtagtgttgttgaacatcccatgtaaaatatacagtattaagcttacgtagtgacgagcctctgtagagcactgtagacttccctggtaccatcagaaggggttcattgcagtgtcgtcactccctcccttgggatgccccaatgctgcagtatctctcagagtgtagcagtttagcagtcagatctgtgatggacctatgaggaccctgccaactccaccttcatctgaaggcttatcctgcttgttggggacactgccagatgtggtgtcagtcctgaaaagctgctagacacccacccttccttcttgtctactcataatggctaaggttgcttgactgttacataactctgacatttctgtgagtccgtttacacatgtgctttagggacatgaccaggcacggggtagtgtgaataggaactgatgctactagattttagaaactgtcatgacctatcacaatgacctatcagtgtcccaccctctgccacagggtgtctcccatcctggttcaggtgtcacagctgtcccttgctgagtcttcaaagtctcagaactagaagtgtggaagatttgtgacagagggactcttgcagaggtcatttagttcaggttccagctaactggtgaggtaatgagggccgagatgaccgccaactgtgtaagcccaccagctctcctaactggggtgcaatgacctttctcctctatgcctcccccccccacctcagaccttcttttccctgaaatcacctcagagagtcacacaaattaaggtacagcctttgaaagagagaaagggagaggttaaaacctcctgatgagacatgcacctgccccgtgtgagtttgcaaggatcgccttaacaaacgccaccagtgtgcatgacctttgtcatggaggctggaagggcaagatccaggtccaggcagagttggtgttttgtgaggtctctctccttggcttgcaggtgactgtcctctctgtcttcacctaatctttcccctatgtgtgggaaagacttcttataatgatactggttgtgtaggattaagacacacccggtggcgtcctttgaatcaatcatttttctaagggccctgccttcaaatgcagacctgttctggggtcctgggtggaaacacagccgagatcatcatatactctcacactactggatctgatgctcatggtcttgcttcacctatgacaatggaaattgtaaccctatccacttatggagttcctggtgagtgatcaggagagattgtgagataccagaataaaatgaaaatcacagggccattagagggtgaagatgaagctcgtgaggcccatcttcatctgtgtgactgttccaaggaccagcactgctgaggtcagaaaggagacacagcctgtttagtcaagaccaagaagagagctggcggtccttctagtgagtatagctgattaagataattatattagctggccctcaaagacacatatttatagccatggcgattcgttattaaggagctaatttagatcagagatatggaaatcttatttttagacccaaaggggagcccagcaggcaggtgactggaggtctccagtggctttcttattctttctgttgaaccagagtctctcaaggttggaaaaaatttgaaaggtcatgctaagccaccatctagtgcttatccccagtgtcccactgaggggtcacccagctctcctttctactctggcatcctatcttagaagtcaggttctactgaaaagcaaatcactgtcactttctggaccctcagcaagatagaggtcagatctaactgctcgaaactcttctgaccttgaggtcagagccactggcccccttggcctttacagtctagccaagaggccttccagtttaggagggaattgcaggagtgcccggcctcctgtgtttttattgatatgagtgtcccattctgggtccagcaagcccactggtggttgttctactgacagctgttgctccatgtaggagtggaacttggttgtttgaagtcgacagtcttctatgagagcctttttggggaaacagtttgtttatatttgaaaggaaatcaaccaaacagtcactgactggggagagagggtgaaaaagaacccaaaaaccatggctgggtacttatggacaggtgttcctttccttcctccctgctgtgagcagcggcacttcacttacctggtgaccccagtcaggccacagcgaggcgaggagataagctggatactctggtgtatgcttcgctgggaaatgagtttactttgagaagcttgctttgctcagcccaagcgtgagaagtttctacacagagcccatgttggtcttgcactgcatcctgagcaaagatgaatcccatagatctcagtggacacggcatctaggccaccgtgaatgggagtgctcttggaccattgtgagagcctgagcaagtcttcatggtgtggtcccccaggttctactctcctcccctgctgtcctgagggggaacctagatgagacctgtggccaactcgagattctagagtgagtagccagttcatagtgaaccactgggaagctgactttgtctggatagttgtgtctgtctcagtatcaaacaacagtagaacaaaaggagatagggtaggttttagatgtgggggaattggagtctagaacgtgtttcctaggatacgttctagacaagtgttaactaaagtctcctaaagacaagagaacagaattgtgtgtgtgtgtgagtgtatgtgagtgtgtgtaactgtgtgtgtgtgtatgtgagcgtgtatggtattggcgtgtatggtatatgtatttttttatatgtagggtttctagggtttctaagtgtgtgtgtgtgtgtgtgtgtgtgtgtgtgtgtgtgtgtgagagagagagagagagagacagagacagagagacagagagagacagagagagagacagagagagagatgtgggtaaaggaggcatagtatgtgtgtggagcttatatgtgtgtaacatacacatgtagggtagagatgaaggttgtttagttatgtgtgctgtgtagtatgtagtatatgcctgtagccaagccaggggtgtgcctctgtgcaggcaagccctcttgtcacctcatccaacacagtggtgttccctcctcttgcagctggcatagccatgattagattattttgagaaacaaagtaggagaatccaagtttaaggacaaagcaagtatctaaaaatcatgtctcctgggaaatagcttttggtggcaattccagagagacctggccacttcaaataagatgagagtttcccaagttagacaccagcgaggtggtgggtcccatggacaggcttttgaacacgattaaatgccttgttcagtatgatcaggattagtgtggagaggtttctttttactctctaaccctgcttgcagctaaaataagacttgggaactagtgtttcttttctattcacagaggaccctgtgagagccggcaaagtgccgaggagcatcatggtacagccagaagtgacacagactctctttctcagtaatttggcgcttgggacatggtggtagccttcgatgcacattcctgtgtgccatctcttctaggacttgtgtttctttcaacggaagcttcgccatgggtggcgttgccacatctttcctttgacgtgccttgtgaacaacctcaatggctgttctgccatcacttccccagtttattcaatcagaattgctgctgaatcctgagtagcatgagtcctaggttcctttgtcttcagaaggtgtggcctggtatgagctatccacagccatccatggggcaaacacaaacacatttccattgctgtagcccttaccatattggctatttttatctgcttttctttcctgcctctctctagctgggggccagtgaagatctgcctgtgccccaattctgcttccctccaaaagatactcagagagctgggagccaggtgccaggagtgcgaggaatccccaaccgctgcctttgtgcttagcatggctggtgagccaacagacttttggcagcatcttggatctttgctattagctgattaaaattaaaaaaggatgctgtgctgttccttgccatagatacagacagtaaagagcccttagctacttcctggcttctgtggccaatttttggcatcaaatccattgtgaattgtcattcttctcccacccccatgatcaggaaagtgcattaacaaattaaaattctctcctgagtcagagtggctttggtttctgggttataaatgacctgaactgtagtcaccagagccattcagtttgggaaagagccatggttgcccaagctctcctacttgctgaggcagcaaagtactggggtttcagtttagccaacatctgtgtttgagagtgatgtgtccagatcccattgccttctgaaggtctttgtgcccctccatttacaggcctgttcccagctgttctttgggcagatgttcctcagttcacacggccctgggactttcccatgacctctactaagttcattttggtccctaaggagtcccctctgtcaactttcatagtcagtactttgttcagacacaggtatgatgctgtcactactaggctgccttgtcctagagtgaccagggagccacccaagtggatatcagcttacacatctcacaggaactcatagggaaggcttcctttcccaagcttctatgggaggcttctaatttccatggattggaagacatgaacagtccaggtccttcagttgcctctggagacatctgatgttgctaacctgatgacatgcggcaatggcagtgatggtgggggtgggggagtgtgggaggggtggtctttattgggctttggaagacatcaggtatgaggcacaatgacatgtcctacagctaggagcagagtgagtacttgcaagacaggaagtcatattctttggttctgagaaatgtagggtgaaggggtagagaggggagggacttatgaaggagttggtgatgatcctgctcagtgctgtgctgtagtataatattatattagtggccttcgtgaatgaggacagcaagggaaactatgtgccaagactcgggcaggtgaagcctccttattagaaataagatcacagggaatgtgtattggtacctgctggttgaccttcacccagttttgtgaagagggtgccctatggggtggctggctactgtagaggtttggggtgctgctaggcctgtataacacagcactgtggatgaggcattacacggcataactgattttcttacactttccagttccacagcctggaagtccaagataaaggcgtcagtgttagcagagatgggtccttctgagggagcatttgctgcaggtctctcctggagaattctgggtcctgatttctctttctctaaggatatcagtgatgttggattagagcccaccctaccaagcacattctgacttactgacatctccatgaagttccagtctccgcagacagccacattctggcagatatggtgtgtatagaagcgtgtcttcctcatgaatttttggcactgatataacagcacagagaggataagcaatttgtcagatgtcacctaggattaggagtcagccaatctcactacaggcgcttctgactcttaaagggttaaaagaggaggaactgccaaagcagaccttcgcaaatggcaggaccatttctggtgttcacatgattaaataaatgagttctgtgaaaaaaacaaaaacaaaacctgagacaataggagtataatctttagaggatagtctccatttccagtctggctgacaatgtgatttgtgtctatcctggaggtccaggatgagcaccaataacagtagaaaacattatactcgatggtctggaccgtctattccccattccatgagcatatctctgtggcttcatttctaacctgatcggggcttatttcaaggtcagtgaggctctcgtggatgtagaacttggccagggcccttctgtgtctctgtgccacttagagcagcttttctgaagctcctgggctcccttacagtcttatttctgactactgatacatgacaagttgccttgaccttgtcaggcaacaaccaagaccatggagaggccttagtactttaagctgacttcccctctgggcaaatgaaagctctggtgcagaagatgagctttatggacccgagcagctctagatatccacatacctccactgcagcatcagagagtcctactcctgtgttgtaaggatgagggttaagtcaaactaaatgctaatgcctgggaccctgctgaattatcccctggtggctgtgacccccccctccacccaaagagaaactaattgtgttcaacctcacatccactgaactctgcgcagccaacctgattgtagatggtggctttggagacagccttaccatcatgtccaagtgcagttgatagggagggattggaatgtactcatttggtatgaagtctggccctgccaatgttgtggccacagtctatgaatgcagatgaaaactgacatgcacacactgagtaaaggcctctaggaagcatctggagtggatgatgcttttaaatgcatggctacatcagaccatgagccctggaggtggtggtgtatgtcaaatagagatggccctggctttataacatggtgctttgccctgtctcgactagcgctccccttgaggtctttgttcttccagatggaaccatcatgcatgttcactgagacccgagtattgtgtatggactcctcattttgtttcttcaaccttaagtagaatcatttatgcccttgggaaatgcatgttcaggtggtctgcggtagagcccaagaagctgtagtcttgattgagggtcttagaacttgaacctcacatattcttccatctgtatcccactttctccctcccgcttttaccctgctctatctttcaacagtacagctcagctggtttctggtgaagccccccagcccaatagtctgctgttgtgggctcatagctccctttccatggagagttgagtgcctgaattaactcttctggagcagtgaaccaccctgagtgctaacctagtttgtatttttagagtgtgctctatcaattacttaacttgcagagcgactcttctgtgctcactggggaagcactgccggagaatattcttcctcaggcttctgtaaggtgtacctttcctggtccctcctcttgggaagcaggtcagatggagtcttctctccatggtgttgtgttctcagtgttgaagatggagagtttgcctccttgcccctgaccctgttctgtacatttgaaagaaactggggcccaggatggtatggaaccaggtgatgtagcacggcagtgctatgcatcaagtttccgaaggcccgcacctctctgctgagttgggggagtcagtgaaattaagagtctcctctggccacataggattcactgttgggcaagatggtgctctgaagggaagctgggtgttaggagcatgacctgtgtcactctcagatagaagtgagggccaggcttgtggtttttatttgtggagaaatgcagtatgctgggccagggccatattagccggtagtttttgccatgctcttgccagcccaggagaccttttgactctagctccaggcaaatggccaaatgacttggtttgaatttcatcatggttctcccacttccggtagaggtgttagtgagcaaccctctgccaagagactgaggttcccaagctaggctgtgcaggagaaggccctcatgggaagggcccaggatacttgcttggaatcccagacatcttaactacatgctttccatagacctaaggccaaggaggtgacagccccgctgatttagttttgagtaccagatgagctcatgataccaactaggatgctgtgggtggtacaaggccttggagagtaagcaggatccagtttcttccttggggcccttatatttctttctagaaaagcatgatgtatctgtctgcaagggaaaagctaaaagcattaggcagtaattgagtgtgtgcgtatctgtatatgtgtgtatatgtatgaatagtatgcatgggtctctatgagtttgttacacacacacacacacacatatatgtatatatatatatatatgtatatgaacatatatgtatttacatgcttctgtgtgcatatgcatgtacatgtgcacatatttatgtttatatgatacatgtttgtgccctattatgcatgcatgtgcttatgtgttatgaacatgtgtatatgcatgtacttatgtgttagtgcatacatgtgcctgcctgtgtgcttgtgtaaatgtgtgtgcttgtgcttatatgagtttgtgtgcctagatgactgtgtgactgtgtgcatgtatgtgtgtgtgtgcacatttgtggttgcagctgcacatttgtcatacaactatgtaaaaacatgtatgtgcatgtctgtgagtctgggtcttatgaatctgtgagcaaagtactttggagtaggattgtgaagtgtgccctcagtggtgggactacatctccagcctacaggttctctggaattcacccaggagaacttgactataggtcagaataagacctcttgttccccctgggccatttctgtttcctcaggactcagtggacgggaaaagaggatgcacacagaatgcacacagactatactcagcttcattcagcacacaccaggaccttcacaatccacaacagatttgaaagtgacccaggcctatgctatgtagaaaatacgctttaaaagtgcttgacaattgcagaaaagctgaggcaggaggtcagtaaggagctaagctaagggtgggatatccctgggaatggacaaatagtgggcagggagctcccactgcccggtgatcagtgcctctctttccgagtgtggaagctttgtgatgcggaaagctacactgaattaaatatcaggattcctgctctagtcttgtttttgtccttgctgtgtgaccttgagatggtcacttgacttctcagaatctggctctcctgtctttacagtgaagacactgaataatctcttgacaacagcagccagattctctgatggaagacatcacttcacaaatagtggggcagggaagcatagagcgcgcatggtgctctggaatatggttgagaatgggtctggaaaggcttgaaggctaaccagagcaaggggcaaaggaagcaatgcagatatagcccaagaagcaggctagcacaatatactttattcttttaacaaacattcatgcaacactcagtggacaacaggcatcatgggaaggagttagcagactattggtcctcatgtcaaaggggacccccagtgcctgatctataaataaagttttattgaaacatgtatgtctgagttggttaacttttcatccctactagatgccagagaaaacagctcaaaagagaaaggttgccttggctcacagtgcgagaagttttagtcctggttaactggctacataattctggaccatggtggggcagattatcatggtggaagggcgtggaggagaaaagccaatcacttcctggcaaccaggagcaaagaagaatcccaagaagaggccagggctaagatatacctttcaaagggttctacttcccccgattgtgcgccacatcctaaatacttcctatgacttcccaaagtagcgccgtagctgggagataagttcaacacatgatctgtgaaggaacatttcatattaaagctataacaatgcccatttccctcctatctattgtctatggctattcgagactaccatagaaaaatcaagacattgtgactgatctcaaaaatagttacagtctggcctgtttaggaaaaaccgtgtcatctttgctgtaagatctttatgtacatgaactgaatataaaccacagcactactgggcaggtgctagttttctgtccatttacagacaagattttttttggggggggcagggtatcaggtaatgtacccaagaccacagttaagccacacaggaaaaaggagatgggactatgaactcaggctcccagactccagagagcctgtgaaggctatgggcaccgggttatgctgaacaagcccaggaatggaagccacgcatgagtgctggtcctcacaaggtgtccttgtcattgccaggtttgtgaccagggtggtggttctcaaaggcctgtttcagcagtaacatggctcaggctgcttaatggggatacttggtccctctgtgctagtgaagttccagacagttcttagaggcaacacagaaatgccattgctcccaaaggctttgcgcagctcctaatttagcgtttggatcagtgtttgtggttgccaaacagctatagttctgtgtcctgctgcagatcacaaatgcttagaagccctggttgtcctccctctctgtgcatcagagagcagagattctttatgttcagaaacatttcctgttgacaaggagcgatggaaatagtgctcccatagggactttgacacaagcggctatcatgtgccaaagtgctcataaccgaagcatccacctccccatgtcccgcagttccctccattcctgttccaggcaggggctcccatgctggtgctctgcctccaccaggatgagctagtgagcaggaccaggagcagcccttgccaatgaaagacctctatgggaatataaatgaatcggattctaccccacccccgaaggtgcagttctgaagaacttcatcctacactgtcttgcccacagaactttggtagagacatccctctgctgtgctgtccagtgtggtagatcccagctatatctgaaagtgggactagggtgagtgaggagctgaatttatcatttgggtgtttccttgagatagggtctcactatgtagccctggcttgagtggagcatacctatacctatacctatacctatacctatacctatacctatacctatacctatacctatacctatacctatacctatattgatctatctatctatctatctatctatctatctatctatctatctatctatctatctggtcagacagtgacttgcagagatagatagatgctctaagcagaccacatgggtctcaggtatggatagaactcaggttcccatgtttttgggaggcacctttatgctctgagatgtcttaacagatctgaggactggatatttttaaagtaatgtgttttatttggccttgtcccccagaggtccccagtgtggttgagtcttggtcatttgcagcgatgtcctgactgttaacacaccctgtatggattcctctgctttccattcccatttcctcttttcctttcttgcctaggaaagccatccaaataaactactcattcatatcatatgaaatctccattcctgaagcctaaaaatagctgaatgtcaatacttcataattcagtttataatgatattttcatcttatactcatctgagagagctcatccagatcagtactgaggcttgcagtttcccatgtgtgcaagccataggtgggcagttgcctgtgtgtgcaagccataggtgggcagtttcccatgtgtgcaagccataggtgggcagttgcctgtgtgtgcaagccataggtgggcagtttcccatgtgtgcaagccataggtgggcagttgcctgtgtgtgcaagccataggtgggcagtttcccatgtgtgcaagccataggtgggcagttgcctgtgtgtgcaagccataggtgggcagtttcccatgtgtgcaagccataggtgggcagttgcctgtgtgtgcaagccataggtgggtagttgcccatgtctgcaagccatagatgggtagttgcccatgtgtgccagccataggtgggtaattgagatctttccatgcaccgtctgagttctacctcagctctgtctctgtgtgaatttggcaaactgctaaaacctttctgcttcccagtcttcaggcatgagcatcctgcctgcaccccagcttggtgcttgccctgagtgctttaaagaatgatggggaggagcaagggaactcatagaggggactattaatgatagacaagccagatcactatagggggaccctgctctctaccagggtacaagaagtcccttgtatacttcaggaaatccagtgtatgtctttgatgtcacagggtctggctttcctgccacactttacctggagagagacagagtgtcctgttttcataatctggtctttttagcaggaggcacctggcagctagcatgagctctctagtaagaactgcagccaatttccccaggctgcagcttcatatgagggagagagttaggtctgtagctgctcagggacctcacacatattcctctcccttgtccacagagtcagctgacagctcattaagatggtgctcatggagcccttagagagctattcttttggtattgagtcagcaggggtgagggtggactgtgttctgctatgttcgttgcatcgatgtgaaggaataccagagagaagctgttataaggacagaaggatctgggctcacagtttcagaggtttgaatgccacttggtggggagtgaaggaacagggcagctcacacaaggggggccaggaagcagagaaaagagagcacaaaacaggaggaaaccaaggcaagaaactgtctccaagggcacacaccccagtgacctaccccagctaggtcccaccatctctcaatatgacatcacattattaatctatccattacaccagagccccgaggatctaattgtgaggggtacccacacaggtacagccagaggggttcttcactgattacctaggtgtctctcaatccagtctagctgacagtcaaggttaattgtcaaagggtcatgacacctgcaggcccctcccaacatcctgggcttcctaggggtttattagttatttgtcagtatacttgttcatgtgtacgtgtcatttgcaagtacttgtgtatccgtttgtgtagaggacttgggtcaacatcagagtcctcttcattctctttctgccttactttgtgagatagggtctctccctgatcctggagcttgccaattaggctagactggctgtagaggaagacgctgggatccccctgtctctacgggcagctttggctctggaaacagtcctgatctccagttttctttctcagtgagctctgtacttggatttgtaagggggtttgctaattgctaggagtacagtgctgatcaagatattatctgtccttgggggtcagggacagcattggaaagggaacgagacagcagccttgtgaacacgagctttctgatggtcccttgggccaagaagataagcaggatagattgacagcagagagtgacgtgggtagggctgcaaactcctttaaaaagggagagcctcagaagttgtgcatggaatgagaagataatgatgtttctttttcaggtcctgagagaaagcctgtcagtggggccagcagcccacacaaaggcctgggttaggtgggaatgaggaaaacaaaataaaacaaaacaaaacaaaaaaccagacagatgtagctgaaactgcctgagaactgcattgcaggcattgacagtctgacttcccttgttttggttcatgcaggtgtcttgccttggtgagtgagtgggtggcaaagacccttcccgtaagtcatgctccattcaactgtggcactaagcaggtggctgggagctggctttctgcctcctgaagccatatcggaattcctgcactgtttctaaggtgcccgggaagacagcagattgcttctgttcagtccatcagccacacaaaagccccagatcaaagagcatgggcttaatttattttgtttattttccagaggaaatagtgcttccttggactgaaagctccgaagactaaaagctgaatgagagggggagcttggattaaatgaatgggctggttctcgctgacccagtttctacccagtgccacagcagcgaagggggaggggtccattctgctcctctgctctggcccaggggcaggcacttcctagcctgttatttcacaggggatgagccttctgcacaatcaggcttcatggaaatgtccttgaagggagcttgtgatggtagcaggagggaattagtgtggcagcttgtgctgcctgatgcccccgtcacctcggctgggaggagaggtgccgatccaggtaaaaccccatggcttttgtaggaactcactaaatgggattgcaaaaggtgcctttccagtgggggaagtaggtgcacttaccacagaggcgagtttaatgttgccattatagtgagtaagagctggccgagattcttgcttcgaggagtcccaagttcaagtggtggcttcagctttcatttgccatgggacttgacactcttactcccactcacatagaggccccagttctcacctctgagccagggctaatggcatctgcctgtacctccttccaggatgctgtgatgccctgaaggtatgtgtggttgcctacaaagcaatgtccggatacccaaggaataatgttctgtttaaacaaaagatggcgtgatgaagcaaaggaaactgaagctggtgtgctactctcagtctccagggcagtggttcttaccccataggtcgtgactcctttgggagttgaacgaccttttcatgggggttgcccaagatatgcggtgtaaatatcagatatttacattatgattcacaacagtgctaaaattgcaatttcaaagtagcaacaaaaataatttcatggtcaccacaacaagaggtaatgtactaaagactcacagcgttaagaaggttgagaatcactggctttagactacatgggctgcagatgatcatgacagggataaggaaggagtataggcagacattcatagggtgtttgtgggggctgccacttcattggtctagacaattattttgggtgttcttgagaaggacagattgtgtttgatcctgtccacttgacatggatgattgagaaacggtcttgagatgcttgggcctacccatggggttcttgcttctctgcatcatcctgggtctaataagacctttaaaaagcaacatcatccaagagtgatgacaggctttgaccatggcagtttgagggttatcctctaattaaagaattaagtcactaatccacaggatgagaaagaacacctggggaggagacatttatatgtagtggtcactaataaactgattttgataggcagagctttaactttgaggactaaagtttttctaacgaagtagacaaaaagaggccttggaatgttaaaacacactcaactaagaccagtgaaaatggccaaggatgggtagtaacatttataaagttctaggcattgtgttggaagatgagtgagatgggtagcatctctcttgactagaacaacaacaacaacaaacagagacaatgtcttcatgggagctggagaagtgctttaaagtacatttgtagtgctagagaggctctgtgttgcagggacttgagccatattctaaaaggtatcatgggttagggagcatttatttatttaaatatttattgagtcagagtcttagctggtggtagcctagcctggcctgtaattcactcttgctcaaggtgacttcagattcacagatcatcctgtctcaaccttgagagcagaagcctttgcatatctttttcagtcactctcgtagagtctttctgattctttgagcgctagtggtttttggttggatgccagacattgagggttttaccaatttgggcgctgaatagttcagtcctcctataaatattcttgagcattttgtcctgggacactgcagttgggctgtgcggctgtgtgggaacagtttgatcctctggggtttgccctttttacagtttgattctctaggtttgtttgtttgtttgtttgtttgtttttaaggtggcaagagagcaccttcacctcagctccctttgcagactacagtagtgtgaggatttggcctggtaccttgggagtttggaggtttctattctggtgagggggaacatagactgtttaaagcccattgtgagctctggcatttactctactctgcctttggtagttgtgacacatgcctggggtgatgagatttagctgaaggctcgggtcctgctgtcaacttccggcctgttgcccaggccactctactttctggtgcacctccctgcaaaccctactctcttcaaccctcctggaatccctccaccctatcatctcagtagtgatgaagccaaagacctctttgactctttgtgctatggccttgatatctttcggtgagaaattggtgcaacctgctctgctcaggtccagggattgctggcttgctctgtttgaattccccagggtttaaaaccttgctctgattgtatttagtctgatgctttgcactgtatgatgtaggaagttgggtgtgtcccctgctgtttcctttgcagagtctttggcttataggagaagactttctagccttacatgtttgtgcctggttttgtctcagtgggtgtgagaatctgggctccgaaatagtcattcaaatgatcttaggccttaccttgaaaatactgtgattgaattgctaagctcagtacttgtggatcctgagtaatggtcattggggtcagcctgacctcagggtacacacagtaaaggcaaaattgacatttactatggaatctagataaactggtgtgtgggtccataccatgacttcccttaaaatgtaacagtgagtgacttgatgtgtagcagggaggtgtccccaaggaccaactttgccctgggtgagcttttgccttcactattgttctttcacataggcatctgcattctgttctctggatgggattacagaaccttcccaaagataaggtctgagtcccacttttcaaaggatgttccggtgtccagcattttcatcagcatctcagttggcatagacctgacatcaaaagttaaataagaaccaggaaagcaaaatgaagggatgaaatacgtgaagggtagctctgtaagcatgaggatcttgcctcaatccctagaattcacataaaaaaatggcggttgcggtgatatacacttgtagacccagcctaagggaggctaaggcatggcggttcctggggctcagtggccaaccagcttgccttgcttgacaagtttcaggttgttgaaattccctgtcttaaaacaaggtggatcactactgatgaaagacacctgaggctgacctctggcctctagattcatatgtaacatgtgtaggtgctcactcatgtgaacttgtatacacatgaatgcataaaaaacacacaaagatgcaatgcttccccattcccgaatgaggatcggggctaagtcagcattatcagaagcagaagaaggttgatcacttctggagaagtgtcactgttagactggaaattagagatttctcagcctccactggtcaaaggaagcacaaggctaataagtctggtacttaatagggtcagatacaagctttcttgacaaggttcctcaactcccacttacaaaggaactttcctctgcattccaaaatatataattatcctagttgctggatacaaccttgttgattataaatagattgtcacctcgcctcctcatcaccctccaatatgtctttcatgctcaattagatgaacgcacttggtgcattttctaatcaagttttgcaaaagttaacccctgagcccatctggaaaagaactctggtgggatcctagtcacatctcatcttctcagcctctgcctaactgttcccactcaatgcatctctctccttgtgattggtcatcctacatcccaatgtagggttccaatcacagtttaggtatgaccctgaagcataagcttattgtagcttcacaaaggacttggatgatactgcccaggagtagggaaagtgacaagaagtctggaatatggcaatgccttccttcttgtggacagttatgggcgagagaagggcatggccttgttggacgttgagaggtctcccgaaatgccatctcatgtctaaggctgtgaagatcattgagcaaatacaggctgcttgcttcctcttcactttgatgagcacagttgggggtgagggaaggagacacaaaccaagaagcttaatcagagccaagagctcctagggaaaatgctttttagacttggtttctgatggtgagagccatagaaatttcaagcatattttatgatccgcacatctattttctctggttttgaactacataagtagataggtcttttaaaatgtaagtgccctaatctagctgtgtctgaaagctttccctactaaatggtagggctcatacctggtgcatatggtccaccagcggtgcagattgcctagacagtacagtgagcacctgtcctctattggatgtacctcaacttcaaacccaagtcataggccagatactctggaaagcactgctgtgctcttcactggaagggagtttccttctagtgccctagctgcccagcctttctccctgaatcttgaggtcagggctctggtttttcctttcctggggtcagagtttgctctctgcctatatacctcttgcttggattgtccctctttgggagtcagtgtccaaggcacagtcatctctttgaccctacagtacattgtcatgacatctccctggtggacagatcccctgcaggggcttgaggctcattttattatctgttcagtgttcaccaaccatcgtattctcagagtgaaagagtgatgttgttgcttgttttaattttgggaccactaggtcaggctcactttgtttcataaggccagagcttagggactgtgtcttcagctagaaacccagctaagccagtcagggttgggtctactggtttttgttgtaggttgtggtttgtttgtccgtttgtttctggccctgtgtagaggatgcatggggctcttgtggctctggacttgagccagtatgatccttggtgagtctgagagaagacatagccaggaaaaccagaactcattttcccatgtgattattagaggaagatactctttttttttaactagcagagcagtttaaagtttgatcgagacttttaatgatgatacagttatgcgtttattgtaagaacctttgaaaatacaaaaaatttatatataaaaccaatgccatctgtcattctacagacagcaatcatagttgggtgtgtttcattatgtaacaaaagttcctccgaaaacacaagtggacgatattatataaaactttaaagaacttattaattaaaagaacaaggtggctaatgtgatagtcaaatgatcactaatgttataaacagtgagtgaaagttttctattttctcccctcaccctagccttcaaagcctacagacttaactgctttttgtacattcttcagggggaggggagtatgttccagcatacgtctgtaccagtactcagttcatttgttacatctatttatttacattggttttggggctcctactcaagctccatgcacattaggtaagaaatcactttatttatgaatcacaggttcatcttctacttgatacatgtgcacacacgcacacacatccacacatgcgtgtacatagttgcacctgtgcataagaaagccagaagaggatgtcagatgtcttcctcaatctctctgtcttattcctttaaggcatggtctgtctctctctgaactagaagtttcttcttttggtttgactagttggctattgagctcccaggatcagcctggccttgcttggctttttaaataggtattgggaatgtaaatgcaggtcattatgtttgcatagcaattggtcttatccactgaaccatcccccttagcccatgctttattattttgaaacataaaagcctgtggtgacatcccattgctactatttcaaaaagcatttaaggagcatcagcaccctaccttccactcactgtcaaccacaaggatatccattccatcttcatttttgttgttgttgttgttgctgaactctgaagtttttttattttgttattcagagcatgttttcataatgttattaagtaagtaagacactgcatgcatggacaatctcacacacacacacacacacagagagagagagagagagagagagagagagagagagagagatgcatgggcacacactcctttgtccacctctgcttcttttttcaggatagatttctagaaatgcaggtctcatggcaaaggatagaaactccactgctgtgggtggatactgtcaagctgtgacacattttttttttcctgtagaacagggatatttctcttacctctgaattatttcagttgttttgaagctttttggaatcgtgtaggaaagcctgcccctgctgttacaaaacatttgagtaatatgaaggcactcaagagaaagggagacacctcctttcttcccagaagaaacccgggctggagcccaagcaggaaccagagagacacgagttcaaatccagatgttgctcttctctttgtgtctctgggttagttacctgctccttcttccagaagcaaacacacttgctttttttgtcccaagataaagtgaatgtggactgagagcctggcccctgggaggcattatccccattggtaatgactgatcagttgcctatgccatactgtgccgtcttcagactcagattaaaattgtgctaggaaacggttatcttcctcatgatgctagctcttctttgcaagatcgcttcaagatctaagcctatggcagcaccagggcacaagttcctaaacgacagcatcccttctagcatagccaaagtcttcatgctttggttttgtgacctacctctggttaagggagcttatgggctctaggtaaaccagtgagccatccacccctgtttttcctacctctttgacagagagctttttggcagccccatggggacagatacatcctgtattgctattcctgagaactttgaactctggaaaaacaaatgactcagacaagataaatccctgtgtgtacttgtcatgtggtcccttagaacattagtctatgactgctgttctcagatctgcaagcatctttttagttgccctgaggcttggcttgttttaatggcagctctgtatataacctttttagtatttacaatagggtcatggtgtcctggtggatgctgtgtccagcagtgttgtttgctactgaagaaatatcacggaagtcagccttccaaggaataaaaggttaggctactattactttagacaatgaggtatcaggaagtcaatgttctggatcctaggatcagagacatcctagaggaagtgtctctccatgtggctttcatgctttggggttcccagaatgccatcgaggcaggggtcttatggttgccatgtccttggtttcttgtcactttatctccaccaaaagagatctccgtgtgcttattatcaaaggccagctcagcatcacctgtgcatttaacaagggactggacctggtgcttacccaattctctagaaacacattctgaatttattggggtcagtatccaagaagtaaaagtacccagaggtatccttggggtgaattctcccagtaacattgatctttgggcgctaaagtctctaggcctttgtactcttcttcagcttcttgccaggtattctgtcctaggaagatgaccttgagtgaagtcggtcattctctgtagctgagcctgacactgaagaaagtaactgccaggggctgtctactgacagcttgaaactgggccacagatcctcgggtagggaacatggcctgctcatgtccatggaacactttgctgcagaatcctgtggtctatctgagccctgaagaagacaaggctcagcagaagatgacagaggcaaaagggtaaggaaaacttcctgatgggcagagcagatgagcagggccgtggacgtaggaaagggcagagacttgcgagcccccatacaaagcatcacatagaggacagggttgggaggctggcccactgagacatggccagagtcacttcctttgataccttaagtagtttgccttccagatgatctctgaagtctgttgtccccatccctttaagaaaactcaagcaacctgtgatgagccttccaaatgacctagagtgaccttcacgtgttgtcctccggctaacttgccttggagagctgggcttaacatctgcttcttctcatagattctggcttctaagacatggaaccttctggagatatgtgggatagcttttagggcaggtgaccaaggcctttaaaaccctacccagctactcatttcccttcagaggtgtgcaagggaactttagggtgacatatccctggtcctaagcttggagaggctaattgacgtctagatctgtctctttgctggggatcacaaagctactcaggtgatgacagactggcttgtctgaaagatggactctgaaaattcttcaaggttctcatgtcacaggcagtggctgttctgcctggtcagataccaaggttcctttttcaggttctctggacatcagaagttcccttcactggttcccattcatttccacagcctgtgttccttctgctctctaacccataccgtctcttgccagacatgggccacatctggagttcctgtcacacgcagctcagtttcctctgtgtgtcatcagaggccctgcttttactgtcaccatgatattttgggatgtgacgaaggaggacggatagagtgaccacacaggctggccttcctgagccttgactgatgtcccctgtgacatctgtggacagtaagcaggttcctggggtgatagaatttcctgttattcaagatcaacagtcaccaagccaggtggctccctgctaactgtcagctcgtacctgggtgtgggctaggctttgggtttctcctatattaccttcccctggatgcacagtgatggtgagtcctataagaaaatctgaaaggctgcagtaactattcctttaccctaagtgccttgcggtagagcttctcttaatacaggctggggagatgactcagccagtaaagtgtttgctgtgcaagcgttaggacctgaattcaatccctagcacctctgtaaaaatgtgggccttgtgtcaggcgcgtaatcccagtgctagtgaagcagagactggaagatcccctgactcgctctccagcagacttagccagccccaggtgtcagtggggaaacctaatgtaaaacaaacaagggggacacatctggagcaatgatacccgaggttaacacacgtgcatatgcacacgtgcatgcacatctgcacacacttgaaagatacacatatgcatgcacacacacacacacacacacacacacacacacacatgatgtttctcttaatgaacatgtcgtgctgaaactgatctgtgcagtactgctggtgcttctcactccttctcactcctcaagaaaggcagggaatcccttttcatccagcagggcttgccctgaccctgcttgtcatggcgtggtgggagaaacttctgagtttgtttctgcacttccttgctggagcaccccctgcctcagaaggctgcctagctgttcccagagcccactgggataagatttctaagctgtgaggatgcctgggcagtctgtggataccattcatagtgctgagagtttgggctagagtctttgaacaccagtgtctctcaacatagcagccatgcaaggcacagtgcatgacatcctggtatttacagcccacagatccatgggtaagacagtgactacagttgccaggtggcaaattaaggggagcttcaagtcagctagcaggtgcagcttcattattaattccaatcacagtgattagttgctatttagggatctggctgcttggtcacctccactgtgcttcatctgctgcctgcagcttctacagagagaaggcaccccatccccccattcctttccccctttgctgctcttccttcaaggatttatttctgaggagcttcaggtcagtctccgaactgagcctttccccaaagcaggagtctgagtaagtcatcccaggaaatgggcatgctggcaaggactggccctagcaaatgaactatgctatgtatgcttggtaccgatcacaagccatatcaggaggctagggaactataactattgactagatgaacagagatgttgagcaagcaggacagtttcctggggtctcattgccaggaagccatacgaacctcatttgagtccaaagctgtgcccttgttgagggattgaggtgggttgggagaacagcctagggttgggacaacaggatgcccatgtgccatcctgaacctgttctggagatgatgaagctgacggggatgcttttcagaggccaagacagtgagggaaagagcacccgtgggcccaggcttcctcttgcagtcactgggggtggggcagggtatctccagctttcatagctaatatgtggagggacctacttcttggaacagctgctatagtccaggaatggggtgatgccagatatagactaggcagtatagctggtgttgagggataagagccttgggcaaaagattagaatcaagtatgtagaacccgtgactctcgataaccaggactattgcctagcacatttatagaccacaatacttgtcaaaaagttggaccttcttggcagatcttgagcccttaaggtacatggactttttaagactcctgagtgatcttttctctgaagcctccctccccccagtgtaacaagcatgagtggtccccaacactgagcactgccacttaaaccaggaatagggacccagaagatctgggttactgtagctatctggagttcagtggctcaaatgaagggaaaatgggtaaatggggaccttgactttgttttctagacagaacataatctattgtccggcacttctatttatagccacccaataattaagccactcaggcggtccaggactgacggggctgcatagctggtgggccatatggtggctgtgtagggtcggtgcctggctaatggaaggaagcgggtgggctgggagagcctcatgctattgtacatggttcatttcttcacagtgtggttttggtcaacagaaagattataaatagcattcataacatttttttctcctggacctaaccttgtggactgtcatgttgtttttgttggatttcttaatgtcacatgtaccaacttatacaatccctactgaaaacctcaggtgtctttctcaactggcatgagggttagatggactctacatatgtacatcagactccccttctctaacagccctcccaggccctgctcttactgcagggtattcactaggcttgaggcatggagagaaagctactgtattttttggcttgaataactttctcatgccctggtgggaactactcacactgtattctgtgagcactgtgtccttgaggacaaaggagccttcgatggcaattttgttattcattcctgtctcattcttgggcctggcttctcaaaagtgtagtctctcaagatacccagatgtgctccatccagacccagcccaactcagcttggcgaccgagctagcatctgctaggttctaagctacagaggcaggggtcaggggaagcagatactgagaataagatgaacgtgatctcactttgcccctgcctccaaacaaaaaaagctatggctgcaagtggggaggaaggggccaagaatcccagcaccaactagcctggttcttcaaagcagctttcttttagtgcctctgacacacagtaattaagctctacttccggagttctaggacttagtgtgtgtgtgtgtgtgtgtgtgtgtgtgtgtgtgtgtgtgttaactgatagatactgatagatatgaattatatgtgtttggggctctggagatggttcagggtataaagtgcttgccgtgcaagcatgaggacccgagtttgagctcagcacctgtgtacgggccagttacaatggctcaggtctcgaactcaagcacaggggaactatcagaggcagtgggtccccaagactcaaaggccagtcagccaaaatagtgaagtctgggtatagtgatggactgtctccaaaaataagatggagagtgatagatgagtacacacacacacacacacacacacacacacacacacacacgagttacataggtttatggcatgctgcgtactggcattccgctgtgagtagacagtgggcggtagtcttggtaattagaatttccatttttaaaacattttatcatttcttcgcaatgagaacctttgaatcccccctttccgtcctaaaacataaaataaatcgctgtgaactgtggtcaccccactgggctgtctgtggcacaggacagctgtggtcgtctcagcatttatgcatgctcattttggcaaacagctgtagttcagtgtgcccggaggacagacttgagcccaggctgatgctagaaggcccagggcccttcctgggaaggtcacgccatatgctgctgtaagcagccccagttctgactgctggggtggctgagtgaccttcagccgggtcactcccttctctgtgtctgttttccttgctctgtagaacggagatacttaaccctgctgggaggattaattgaatgggcacttaacagacagcctgctaacccagtggcgcagaactgggatttcttcctttcccagcaagtttcctttaaagtctgagatgctgccaagtcgttaataatttgttaacaaacatccaagtgtcctgggtcagctcagaccacaaggcattgttttgggtaagtgaagaatctttgtgccctgttaatggttaggcccaacatgaggcttttaacctggaaagcctcaagtttagcctagcgagtttgctctagctcagctgtaccagggctatcgcggaggtggatgagaggtctgtatggatggggaggtggggccaggtgctggttgtgaaggcaggatttgaggatctgtgctggggatgggctcctgcaagcctcttgcagggcagagggcctgctggggcttgggttcattgttttgcaatacagatatgttctgtacctatggggcgccactgactgaatcattggggtttgttgtttgttttgtttgtttgtttgtttcttctttttaatgtttgtcttttggaggcagtcttgctagctagctcaggttggcctctaaccagcgatcttcctgcttgtgctgcacacccagcttgtctattaattaattaatttagagacaaggtcttactatatagtttttactctcctagaactcaatatgtagatcaggctggcttcagactcacagagatctgtcttcctctgcctcccagatgctggcgttaaggcatgcatctccacatctggccttgtctccagggcttcaggtcctctctgtttttacagttcttggtcccactgtagggcagagggtataggattgcgagcttactcatagaagcctccctgggctcgtctgtcctcggcaagctgattcccataggcagcctccccgtttgtgggtgtgctcagtttgttttgacatgaggtcatgaacctgtgccatagatatggatgtttagggaaacattagagtttgtttaaggttcttggtttcctgaagcacacactgtcaggtgtgtcagcttccatccagggacaggagattgaacaccgaggaaaaggtggttccagtattgtgaggagcgggtgtggcagcagtcccaagaaggcgccagggactgcagcttaagtcttatgacttgcacctgacttcctcatacacctgaaaataagccacgaccatcgtgagagctgcgcaggtgcaccaggatactggcgaatccattttggtggagacatgcccctgctgccctgattagctgaagctgcttgcctggtgaggtgacatggcctgccgtgagtggatgagggctgagagtatataagagtgagaggcccgggtcagagagagtgaaagatgggagaaagaaaaagatgagggagaaagttgaagcgagagagatgaagactgacgtttgctgaataaactgttgttagaaggactggtggtcgtgttgttcttgctggtcaagagcggacacgacacagtatcagttttcttcactcttgtttgaactcccagcaccctcttgcatcttagaacaaagagccaatctctagcaatggccctttgccagctggtagtgacaagctaccaacctacttttcttttaggctgtgtttgtctttgaagattatcttctattttgaaaaaaaaatacaattaaaagtatttattttgtgttgtgtgtgtgcatgtgtgtatatgtatggccatctgcatgccccaacaaaagcataaacatggggctcagaggatgtgtgggtcctggggaccaagatcagggcaccttgttcagcagcatacttcttcatccactgagcatctagccaacagctccttcccttctaaaacatgctatcagtgcagtcttcacctatggcagcgttagaaagtttcagtaaattgtattctctacagcaaagagaggatgggtagttagtggtacaagttgttggacatagaagctgtgagatgtgcatggttgaagtgctcaggagacactatgtcctcctgattgaatcaacccctactggcttagactcctttctgaagctccgtggtggcatatcgcaagtggctgggtccttcagctcagtagcggctcttccactgagcctgtacttcatccatgattctatttattgaacaagtgtttaatgacttgtgtccagggcctaaggtttcattgaggagaaaagtctattccttgagaagctgagaggggttaaggtcaggggtggggcagagattaatgaggcctgaacttcaaggtgtgtgtgtgcgcgtgtgtgcgtgcatgtctgtgtgtgtctgtgtgtgtacgtgtgtgtttggggctgggtagtgggtaaagaggaacatcactgtccataaaagagatacaaacttccttttcacaagctgagtgtgggcttatgctgagatttgtcacacagcacatatgttagcctgcttccccttggggtgggtgggtgtccaggtgcttggggagaggggctcttgatggcagctgtcactcaagtgcatgcatctctcatttcttgttgccactggtgctattgcacactgttcagaaagagaggcatccactggagcccattttccccctaaagcaacaaagtaatagtccatttcctattggtcagttcctccaaggggagtatttgtcagggtttctattgctgtgagaaaacaccatcaacaaaagcaacttagagagagaagggtttatttcagcttacatacttccacatcacagtccatcactgagggaagtcagggcaggaactcaaacaaggcaggaacctggaggcagcagctgatgcaaaggtcatggagggtgctatgtaatggcctgctcctcatgaccatctcagcctgctttcttatagcaccccaggtcaccagccctgtggtggcactgcctacagtgatgagctaggcttttccccatcaagcaaatgccacaggctggtctacaggctaattgttcaggttttctcacctgaggttctctcttccaaaatgactctagtctgtgtcaagttgacacgtaaaactagctgactgagggaactttctccagaagctgagagtcaggccttctggtcattcctggccatgtgtccagtcctcccatggtcagcaaggctcttggactagcttgggtatatgggtagctccttgtctcctatgactgaagctgaaggaagtttgagtcccatggtgcctaacataggagttctgtgtgcaggataagaaagggagaacttggaggctgagacacattgttaaaaaagtttcactgggataattatttaacacttagattgggcctagggatccattaactagagatttcattttctttccacataagattttgccccagagtgcatgataacctgaggcacacggcaccaaggcaggcatactccaccttgggagacagttcatatggggcaggtttgtatggggggagacatcgtatagcctaatatgactctgagcgcatgaaattaaagcagacactgggaccactgcctaatccctcacagcctctgctctgaccagcccagcttgagaagaggaagctaagcgttccctgatgctgttcttcccccttggagctggaagaggttttctgaggctttgcctccctaacctctgagtcacctgaaacttccaagatcctctcttggtccccacagttcttcctgatacccgtattatcccctttgtcatgctgtagctctactactgaggctagaatagaagtcttttgcattttactttctgatttcaaaaaaaatgttgatcatttacctttttaaatttttcaattgtacccgaatggatgtgactgtcaaaatgactgtggggcagagaccagatcaattccagactctgagttttctgatggtggactgggcactgcattctgcacacatcatgtatgtctaactttgcctttcctgttttctcattgttgggtggtaccataacacatcagaagcacatggatgagggccctcttgttttggacagtagcaactacctagtgcctagagcaggtcagtaaaaggtagctgtgtgaaagagtgtaatacaatagtatggttcactgccttcaatcgtcagggagaccaagtccctctggcctgtcctttggtgttgcctaacactggtcacctgaaggtgcagggaggagagggggaacagaaggaggagcaaggacatagtcctgagtctgacatcctgcgagtgtgagggtgaaccttctggcccctggcccagagtcacagtagcagcatctagtcctctgtcctttgtcctttgtttgccttgcaatgcaggctccacagaagctgcaagtcactaccatttgctgctgcatttactacggatggctgctctctggccacagagcattcagcttctgcttagagacctgctagttctggctctctctgttctgtggcctcgctgcaatcgggtaatccaggagagttgtgccaaccagccctttgcccttcttatagctttagagctctctgcttggaaagataaagggggatcatagaaatccctgggacactgttgtccctccccagggctcacagaagacccttaggatactagaggtgcggaggattgattatataccaatccccgtacaaaatcaagtaacatcaccctgttggttcatttccttcccaggctgttactattctggtttgcaatctgagcatggaaaccagtctatgacttcttcagtgctatgtgttggctcctgaaaccatcaggatagtaaataaccactcactgtgtgctgtctgggccggagtgacagaagcctgcaccctgatgtgctgtttttggggtagacactggacaagctggtttgatttagaaatcggtctcttatctctcacaatggcacaagcacagagggggacagtggcccttccggagatcacagagctgctattgtaaaaggcagctctgcagcctgggatatgatccaagaaatgaagaggacacagaggtattggggcctttgttgtgttattgataacctgtgaattgtaatcaaggcaagttgacagacgaggccttggcctttgttggccaacagtttattacttccttcagacttaattgccagcgctgacacaaaggtgtactgtatctttaaggagatgatggctcgtgggagttgctcttagatcgtcaggcaagttgtgcaaggatgaactgtgagtggataagatctcaaagcctccttaagctggtaccataggcaagaccttctcatactacctttgccaggtgcctgctttctgtgttccctggggcaatctgtagaatgctttggttactaagcagtgggtacagaactaaacagaattgtgcagtggctctgggaggacacttattttttttttttcatcttgagtgctgtgggttacatccaagtcttttgtgtaacaggagtgggccagactggactgggagttctaggcacagcttctcgacacatccatgaatgggattttaaagtgtgtcttacttgttgcgagttcactggtcaatgaggaagttgggtggcctggtatgttacatatctaagattccataacatagcctttggagcattatcatctttgaaagatagaaagaaatgatagaaacaaatattaggaatgggtctttgtgggaaactattataaaatatgaggctaaacaaggatatgacacagaacattccaaagccattagtatattcatgtaacatgttaattgctttcctatgactaaaatatgtgacagaggggtttgaggaagaagaggttttatttttgtctcattcttgaagataggacaccatggcagagaagggatggcagatagatcatgacatgctggacacactgcttctgtagtcatgaagcagtgagacaggacaggaagcggggctaggctacacaactttaagaatcatccccagagtgatccagttcttccagcgagggtcctcctccaaaatgttccacagtcttccaaaacatgtcaccacacagcatttgtactgtgcgtagaaacaggtgagtctatggggacatttcacatctgaactgcaacatatgcagaagtcaccaaatcatgtgtaggtgactgggtactgttatacccatgattattcaactcatccttctcatgatcatttgcggttgtgaggctgggctaggggtgtctaaagtggtgatgactttcctacctaggggacatttgataattaccagagacattttagttgttatgaatgcaagttagcattgtaactgtcatctagcagtgaaacccagaaaatgccaatacacatccatagtagagatacaactcctcaacccacctatgtgccgaggctgacaaaacggggccaaggtagcctcggccactgcctccatacctatgaccctaacaccgtgcagcttggtgaccctccacaacctgatataccacctagcttaccctggtgtgaagtccctgattcacacttctctagaaggcaagagagatgtggtcttatccttgcagatattctaacattcctggcttaagacccacatgcccatctgtccacatactcagtgaccatggcctggcacttctccagcccggaggctacagagaggtgaggcgaccatgagctaccctaccccccttccctgtctttgttctcaccccagtgctaagctaggagttgactttgctctgttgcctgagaaacttggatttcaaagctttctctgtctgccaagaactgttcctgcagacagaacctgagattccaagattctgcctcttggattactcatcctcatgaagttttgagatcccaggtggtctctatgaacactgtgggtacccaggctctggtgattctgctggtgcctttttccccagtaagctaaccaaaggcagtggtggaaatcccatcagaggctggcctgcagagacccaagtgggacctggatcagtatgtgcagaagggctctgccaggacagcttcaaggaaatcagcaggtgttgtctgtggcttcattcttaatttgcctctctcggattctgctccaggtagaggcttgttcttaccatggggccacgaggaagccaagatggctggtcactctctgcattcatgcctctgcatcaatcctgggcatattctcatcaggctctgctatcctttaggatgccagccatctgttgggtgatttgctttttccttgaaaggcagaacaaggaataattgacccacgggggctcggtcactaacctgttctttatcagtaacttccaatgaccatattcatgtttgacatctactatcagccgggaaacaaacctctggatgcacttgtgagggaaattctagatagcttccctaaggtaagaagacctgccctagatgggggtagtacaatttcctgggcttgggtcctagagtaaggatgctgagcaccagaggtcagtgccctacttcctggatgcagatgcagtgtgactacctgccactgtgattttctaccatggcggactgtgctcatttactgacagccagtgcaaaccttcctttcctgaagttgctttcgtcaggcattttgtcacagaaatgagatccaccatctgcagggcagtgggctttgtcagagaaggctgaatgagagaaattcacacagcagactttctcatcctccaagattggagcgggtggtggaaaacatcttcctgggaaatagcttccgtgatggatggtgacagagggcaaaatcttgggctccgccttcatgggctcagactcttgtgagtgtgttcatgttctgtgttgctatttcttccatagttgtttggtaactatggaaatggaaagagaggggatgagaaggtgagaagggtgggctctcttgtgcaagcaaccagcatagattaagtgttacatagctgcatgcagtctctgggctcagctgaccctcacagccactatctacagcgactttgaacatcaccctttctctgtaacccttaaggaaggctacagtgctgtccaaggatgcacgagtcaggaggtagcagaatggggatttgaaccaatttggatgccataactaagctctatattttatgtctctcatgagagcttcttggcatccagttgacactgatttcccaaaaacccagagctctaaacatgatttggtgtttgagaggggtggaaatgagtggctatcccacccaggatggtatcttcatactcaaaggcagcctctaggaagaatttctgggcactgtgctcggaaactgcttgagctgaatattagaactgaattcccctaggaaaaattttcaagctgtaagcaacacccctaaatggattatgaaatcaagttaggacattgaagcctatgttaataaacaaaaataaaagatagcaaagcacatcccttagaatagatctaggcaatatcccatgaatcccatcatgcacttactgatggagaagatatagatgggttgccatgtaagacatgctttttgtttttgctgttactttggaataattttatttatttgatattttctttatttacatttcaaatgttatcccctttcctggtttcccttctgaaaaccctctatcccctccccccttcccctgctcaccaaccacgcttcctggccctggtattcccctacactgggcatagagccttcacaggaccaaaggcctcccctcccagtgatgcccaacaaggccttcctctgctacctatgcagctagacccatgagtcccaccatgtgtactctttgatagttggtttagtccctgggagctttgggagcactggttagttcatattgctgttcctcctgtggggctgcaaaccccttaagctctttgtgtcctttctctagctccttcactggggaccctatagacatgcatttttttttaattttgctttcttttgatgttcaatgaacaatgtatgcatttatggggaacatggtgacatttcagtatatgtattcattatgtagtaatccagtcagggtaattagcatatccatcacttcatacatttttcattactttgtggtatggatattgaaagtattctaggtaggatcaggattggtaacatataccttaaataccagcactcaggaggcagccagtagcctggtttacttagcaagttccagacaagctaggactgcacaaagagaccctgtctcaaaaacaaccttctaggtatttggaaaccctgaatacagtattcagtatcatcaccttattgtgcaatagaacctcagagctgatactgtttacctgtctgaaattcaggcctgtagaacagtctccagccacacccctcattcccccatctccagactctgattactgctcttctattctctgtgcctctgagattgtggacttgagcctcctcagatgagagacatcacatgcttactgtcttttggtgcctgtaacatcccccactgccttctagttctgtccatattttaaatagcagggtttacttctctgtagaagaaataatgttccattacatatgtaccaccttttctcttccatcccacatcctggttcatgtggatgcagtatgcattcctcacttatgtcaaggcagtgggtttagatgccctggagggtaggtggactcatggcagatgttcctccaaaggagtgtggtacttggtcttctagtccccgatgaagacagtgttagagaaggtgagagggagcagcagggcatgaggcccattaggaaggagagacaggagcccctctgcaaggttctggtaggtgctgtggggctttagaggtgttccagacaaggaccctcctttttatatccctttccctttccaggcagagaccagctgtgctgaaaaagggaagagtctaggacaggaaatctagaccagaaaaatgacactcagtgccatgttccggaacttccctcatgagctccaggacagactgcatgggattaaatctcagctgtgcctcttccagctctgtggcctaaggcagttcccaaacctctccacctctccatgcctaattttcctccttcattgatactgtgtagtgatagtttattttgcatgaacttacgaggattccatggattgatattttaaggagggctcaggataaagcattgtgggcaaccctcttctttatgtcacacacacacacacacacacacacacacatatccagtaagttttgtcagagtgttcagcagaaagccttacaacaccaacatcaagctcttgaagatgactctacctgaagtctgtcctctcataattagtatccattgttcctatatggagagcagtatgttctagatactgtactgaaccctccatgtgtgttccacaatccagctctatgggacagatattgtgcctactttacaaatggggaaatgaaaggaaggggaggcaaagcaggcccaggctctggggcccatgaccttgttccagccaccccagcttgtctttggtctgcactggtgggagggtgctactgtctcttcccccttctggacagaaggagagtttgaatgtccctgtcttgcacaacacccgaaactagcctagagatttgctgatggagccagatagccctgtctgtctggggctgtggtctgaagatgctctactgttaactctgctctgcaatcagttccccctcttcagactcaaaacttcaggctctgtcccgacagatgtcatgacaaacagaactcagtgtattatcctgccaggatgctcagcccaacagattcaggtgtatgcagacccttgactgtggaggaaaagccatgagaattactggactttctagggcatttcactaaaagattccacaccggggactaaaaatcatcctctgttctcagacacctaggcaaggtctgtgtgctctctagcccagggtaaagtgaggccccactgaaccagaagagaatacagtaccatactgttctttctcccagcttggggtctgaggagggagatcactgttaaacaactcaatctgcaaatagccatggcattaaaagtgcagtgagcctgctagaggaaatggatgggttgctatgaggaagaagaatgaggggccctaatttagactcagccgtgctgtgtgcatctgtcaaaaccatgcccatccttcaaggcttgcagacataccaccgccctcattaaatctgcctgccactaacacttatctcctggcattctcaggttccccaccatgttctgtcttcctcgccaatgtcacatactgcctgtattcactttgaagcactcgtcttatttaccctgatggatcttcaactcccagagagagagagagactgtgttccttgtatgtgagcctgctgtgagcaccctggttttttgggagatgcacagcggaatgactaagtaaacacaagcattcattccgtaactctagcagctcgtttaggaaaggaacaaatctctatagtgaggccagaggctccagagcccacttgcctgagcttcactctgtttctttacagtgtgatgaagtacaggtgccttgacctatctgagctcctgaggcctcatctgtacaagatgtcagaaatgctaaagaggacagaagggctcctacaggtgcattgcttagactcagtcttggcacatagtgctttacaaattagtagtcctgtgtctgaactatctaaatctctcaaaatcctcctaaagccactaccatgtatttataattattcctattttgtagctcagaaaaaccaagctttcagagggtttggacctgttctagtttgtgcagcaaattaaatttaatacaaaaacaaacaaaatgaggcccaggtgcaaacccaggaacatgagtctctactaaaaataactttattcccaccttccccaaccacaaccccagagttgagcattgaacgtaaggccttacacatgctaggcaaaggttctaccactgaactcggcctcagaccttttgctactttttatttttttatttttttattttcagatgaagtctcactaatttacccaagctgctttgatcactatagctaagccaagacttagaattgtgagccctctgccttcttcttccaattagctggtatggccacccaatttcctgtggattttactgtggtgtgccagtctcctagctagccaatcttcagtactgtcctcagaggctgggatgtttgtgtctcagaagttcacactgttggccaaagactaaggttgtacttctaaagccactgaacatttgaaatagatgctggcttcaggaagcatgagggttaggattcttagctacaaggggaagagggctctggcctatctgtcttgaagcatcagatccccctctatttttccatgggtcctgatgtggaagttgtacccaggagtcctataccctgctgcagtatgggatcattgaaacagcaggaagctttcaggttctgtgtgaggttctgtgtgtagctgtgtgagggtagccagctctaggttggtgtgggcagaagagggaggaaggcatttgattggtctgacttctttattctgtggccttcagttttgagactggtctccttactctacatcagcactgacaagctgtgtctacattctcttattttggatccctcttaaggtgccaggctcatagctctgtctgctctaatctttttgagaataaaaaattacaccccttatttcccccccaggaggagaggggtataatttgtgactaaaaccagggtgctcaggctgtgaaaatatctactgcttagctgttgccatgtgaattagagatggcatttatagctcagacccagaggacaagccgtgtctttgtcactgaatatcctctcctggaggttccccataaaagtgtagctttcggagcacaggatgagagacagccaaacctcatcaatctgttcattcatccctaaattccctccctctccctgtctccttccctcttctcccctctctgccttcctccccaccccaaaataataacacaacttttgctaagttcaacctcaaggtacaaccctacaggacatcccattattagatgtctagtttccaaagagagagacccctatgcaaacactcactggttagctttgctgatgagaggagcagagggtgaagcccattgtatctttatcattcacatggtctcttgcagaggaaaaggcactggtgtgcattacagtttcaaaggagagttctgttgcctagggttacagcagggaaacaccacagagtgatggctctcaaatcacagaaacttattaccttccaatgctggaaaccagaagtttggaaacaaggtatggatgagccactgcctctgggatatctggagagatacttcttcctgtctttccactgtttctgctgattgcaaaaccctgggcattcctgggtattctttggcttgtggctgtataactcctacctctgtccttgttaccatatgggtctctctctctctctctctctctctctctatctctctctttctctctctcccctctctctctcggtgtgtgtgtgtgtgtgtgtgtttcctctagtagctttgtatctgaacttgcttacatccatccacaaaagaccctgtttctgaatgaagtcacctttgtaagttttgtgggttaagattaaggcacatcttttgaggggatacatcgcaaaccattatagataacatgttggaggggtggatcagggtttcctgtgctaatgaggggaagtagacatgttggggtttgagctggtttgaattttgtcaagttgacacaagccatggtcatttgggaagaggaaacctcaattgagaaaatatcgccatgaacatagcttatgggcaaatctagtggacattttcacaatcagtgatcagtgtaaaaggggccagcccactgtgggcacgtatttctgggttgggtaagaaagaagactgagtaagctatgaggagctgcttggtgtctgcttcagttcctgcatacaaccatattcatttgcttatgtatcatctagggccactttcaccgtacaatgccagaattaaatctctgtagtagtgaccctatagtgcttagtagcaaacagtagctttatgccccattgcaggaatcattacagtgggctggtccttgtctcagggaggcacagaggtactgctatagtttggatctgaaatgtctctggtgttgcaggcttggcccccagcccatgctgatattgggacatgaggatcctgtaggggtggagcctagtagaaaggagttgggatactggagagatctcctgactggaagattgaggctttagcacctcctgttctctttttcttcctgactgctatgaggtaaccaggcctcctctgccacatcctcacacaatgatgtattgtgctaccacaggcccaaagcaacagttcaaatgaccatggactgaaatctctaatctcttggtcttaactaacctttcccctcccttcaagctgattatttcaggtgtatattttgctatagtaatagaagctgattaacctcatgtttgcaaatgctttgaggaagtgtgagaagtgtggagaccatacaattgggaggcttcattgactcctggtgatgctggagtaggtggagaggttaagataggtcttctagataaaagtcttaaagactaggaaaaagtcattaactggcctgggtggagaagggcaaaactacataaggatctgagacagaaaagaggcatgggaggaagttcaaatgtacctgatgcttaaagaaagagagaccagaagtagtctttttatgacatggtcagatgtccatcgaatgtcagttactccagagcatgtctgagtgcaatagccaatcttcattgtcaacttgatacatctaggaaaaaaaagagtctcagcggaagagttgcctccatcagattagcctgtgggcatgtgtgtgggttattttcttgattggtagctggtataggaaggttcagcccatcgagagtggtaccattcctaggctaataggcctgggctatataagaaagacagctgagcatcagtatagcagcaagcaataaggagtggtgttccatggcttctgcttccattcctgcctccacattagtgccttgacttccctccataatagaccgtaacccataaaaggacctaaaccatttcttccatgtgtagcttttgaacacagtatttttcacaagaacagaaactgtgctaggactctaaagatcctgaacttcacccagggaattatggatatcaccaaggcgtgtagcacaggagtgaggggatggaatgctgcgaagtctcttgtgccaccacgaagagtgagtacaggcctggagcaagtacaggctgagtagtcacctgcagagggaggtagaacggattgcatatattcaggctcctgatgcttctgaccctcatctgttggtctacacgcccctgacaaccagagatccttgtttcctggtctctggctctgcactctcgactccagctgcttgttgcacacctgctgtgaagccatagttcctgtgtgttgacactctccagggcatgatcatgacattcttctctggtgattgatggatttagccataagactctactataaatgagttgatgacaggggaccagattacacagacaggcaggacaggggttgtggggactgttgaaaaacaccactgggagacattgactatgatccagatatcttggagggctttctggtagaggcagcctttaaactgtgccttgaagaatgtgtacaacttgataaggtgaggagtataataattaattcaacatgtgcttaatgacggagactagtaacagcacacaatgggtgcagggtcaaactagggaagccatgagcctggtcagtggccctgaagctctctatctggtttagaaatgtgaccaagatacttgagtgtttcatgctctcgacactttaatccaaggtggcaggaaatgtccactcacgaatgcttctctccccttaccattccaggtgcatccttgtttcatttcacagcctccccaggcaggtgcaaaccatgaaccacatcctcctaccatgaaattgtttataggcatcgcccttagcaggagccaaaaacaccttgtcacttctacaagtcctctggggtcctagcccaggactttttttttttttttttttttttttttttacctctctgacctttcagtttccccttctggctggtgtcctagcccctgactgttctaggatcaatgactttcaccaaggttttctcattcctacccttgctatacagggtcagcatacagggttatctgtagtctgagccttccatcctatgccaggagaaacttcataaatcctggcagtggagataggtccccctaagagcagtttgtctagttaatttattaaagccttatgaaaatagtgaagcaaaacagatccacagaaaggaatgtttttaaagtacaaaatagttaataattaggagaaaatctaagttgttatcagctgggtcaaaaatacaggaaagttggccttttgtatcaatgagttgaaccaaccacagactgaaaatatttgaaagaaaatggtgtgtattttagatttttttcttgtagttgttttattggggtagcatttgtattgtactagatatggtaaacagccaagagaagaaccaaagtgttcaggaagatcgtgtgggttacacacaagtactatgacattctatgtaatgattcattcattttctgttctagacctaggagctttataaagatggtatcttagtgtttttattgctgtgaagagacaccatgaccatggcaactcttaaaaaggaaagcatttcattggggctggcttacagtttctgaggtttagtccattattattatagcaggaaacatggcagcatgcaagccaacatggtgtgctgaagaaggagttgagagttctatatctttatccacaggcaacagaaggagactataagccacactgggcataacttgagcacatgagacattaaagcctgccccaacagtgacacatttctttcaacaagggcacacctcctaatagtgccactctctatgggccaagcattcaaacatatgagtctaaggggggagtcatatttatacagccacacatcatagagattccaaagcatctgcttggctcctgtggggtccccttggtagacccctaacatggaggatggtattatgatggcagcaaatggaagagccagagattgcaaggtaagacaggaagatggaagggttcaagggtcaggcttgctcttctgcttcatgtcactcttaagggaactagccttatttccttgagaccaagagtaatctaacaactttctccctccttccttttgtaaatgctatctagcacactggggaccaggcttccaatagacaaaccttgaggagacaaactataacagaacataagcatttgaggatttgggtatcctgaggatatagggtccaagaacaaaccccaggttgtggccaaaggagagtcatattaatggcattctcagaagcttctgtacagacccattcttcttggctgattcctcatgtctgatgttagaagactaagaaatattggttgccataatcagacagagacagctgcacagataggaaagctgagatttagaagtaacccagtgataggacttcaggagttgctcacagaaaagacctcttcccatctgtcagtcttagagacaacactagccgttgctatagaaacaggaggcttgtgggatgcctgcccaggtgatgcctggcagtgtttagacagcagcctctgtcctgttgggcttgtctctctgcagttgttagatggtggcaagagacttctgagatctgaaaccttccccaccctgccctcttcatccaagcactgacaaccactccgtgtcacaataaaccatgcgccttttcttggtgtctcgagtttgtgggtcctcaggtagaaatctggaagaacaaacaacagtttagaaataactcacaattaattagacaagttacagatggtttggagactatatttccattcagttctggagaggttcctctggggtagaacctatgtttgtagaaggcactgtatctgagcaggaagacagctttcacagggacagaaatctacagggctcttcactgtcttctaggaaaggtgtatgtgatccattttaggcctcaggtacaaaattgctttcaacagtagctctttggctattcagagtgggtgtactacatacaacgagatccacaggttctcaaaatcaaagagaagcagcgaggctggcgggagaaggtctctgtacataagtgtgtgggataagaccttctggcttcccattttctctgacttcatcagagggttggacctactacttggcaagcctgtcttcctaatcaaggtctggagacaaggaaaggatttaagtgcccccagtgttgcaaactgatgccttcagacgctcagcaagttctgtctgggtggaaaacttcatccaaagccagactgaatcacaccagtttctaagacattcctcaaccatgttaggcaagctgggttagaaggaaacctgatataattttggaaaagccttcctagagaaaggacactctcatagctgcctagcttctttcagtgtccagggttggagggatctcaggctccacagaggagcccagtgggcctggggctggcagggagacagcttaagttctgtaggctatgtttagtctcattgcaggttgtctagaaggaacagaagttttctgatccccatagaaataaaagtcaagttgtctctcccctagctattaagtaatggttaaatttcatagtaacaccagaatctcctatttgactgctgtgctaggagcctagattcagttagagtgaggacccagagtcttaggtagctgaactttctgatctcagccagggcctggcttggctaagtttggtttgcttagaggagtagctgtctaccttccatatgcctggtcactgactgggccatctttttgtttcatcatgcctctttgccctgctaggctttaggttttcaaatggaaacaaaaggaagtcagatagatgggcaaagtagaacaggtttctgacctctattcagaccccatccaagttcagcaaatggaaaatgcagacaaatgctcagccggtgagttctataggcacagatttgactaggtcctaaatcacagtggcgattttcctgaggtgggatgactgcttttgtaaacaagggaattcatcttgttgtgatggacgtgcctggtgaagcatggtcttctctgaggccctgtgttgtctgatcatgcctgtagtagcgtctgcattgaccaatacagttgcaaaggagtggcagttaagcaaacagctgtaggttgtgctgggagtcctggaagttagcctgagttaactagaggttcactgctggggactgggcttgcctctccggtgtctactgagtgagcagcctaaattcatcaatgcatggctcttcatcattttgctacatgccatatactttggaaaggagctagggagatagggaaatagctctttggataagagcgattgctgcacaaacacggagtcctgcatttgaatccctggcatgtatgtcacaaacatagcctgggtgtgtatgcctgtaatcccagtgctagtagacagagataggtatattctgggacccaatgagcttccttggccagccagtctcactagaaaacatgaagtatacttcagtgtgagaccctgccttaaaaatatatggtagaaaatggttaaggaagacactgtttccctcttcatgttggggaatcctcacagccatgtgcttgtgctacaagcatccatgtgtgcatgtgcacatgtgtttgcacacatgtgtctgcaccaaagtgctctctctctctctctctttctctctgaaagcttctagaattgaaatattacaacatgaagatataataagaaaacaagattttctagccctgtttagtattggaggaaagatgggagaagaaagaggaatctgcagagagatggatctaggtggaggacttcattgggtccctgggatttggtcagggtggatgaagatgtgggaaatgaagagagagtatcccaggagaggaacgaaatacacaaaggtgtggagtggaagtcagctggactaggttcagtcaagtcatttgagacagagcagtttagcacaacgtttgggagggcacagccacactggggctagaggacatgcagactgggcctcaagtacttctgcttttgagatttggacaggggatgcttggcaagattttaagattccaaacaatatgagtaaagaatgaggaaaagaacaaaggcaggtccactcactcagtcattctctcaaggagcctgctgaactccagggacacagctcaggaccctaaggatgtaacttgaacagattagggaaagaccccagctaaccctcatggagcttttgtatcatggccaattcccagagtgaagaaggtattaccaggaactgccaggacaagagcaagtagcaaacaggtggaaggctctgtgtcactttggacactgggcattggtgtcgatagcttatgggttactcttccttctctgtatttctccctatgtaaaggagtccctccttgtcactccccatacttgctgtgagctgatgaatactttaccactggtgactcaaatgatggcataggaccacagggaaaactgcagtgcttacagagaggcagggttagctctgcctatttcctgtagtagttacatcaaggacacccgatgctggaaactgaggacccagtagagtgggaaccatgtgatctcttccctctgtcccatgggcagggatcactgaaagttcaagctctgatccccaagagtatgttcatgagattcagacttttctggtcatgtcaggtgacagacacagcccgggctccacgagtgtgagtgtgacatctgggtgccttcacttccccatctgtagaatgagggtctgtactatgtaagcaatgtctagacttttcctgggagagtcaattaaactttaaaacacagaatttcacaaggctgccagcttcttattctgacaagcaaaggcccaacaaagaaactgtcaaatgccaactccaccatcattgtcatttccttcaaagggcaatttaatacccaaccaagaagtgatggcacaatgtcagagaaaaggacagctcttccccagagagagtgtcagctgtctttcactgaccctctacatttagttatgttggcctctccattccagacagcattctggacagtgtggctctgtgtttcatgctgttcctatagaaccactacacctaagagtcaacctacagacccttttacaatgcagtgtgaggtcccttgaggccctgatgaccttcatcccagtggtgtccctgggctcactttcttctctccctttttcactcttgaccctctccttgttcttttctgtgacttctctctggaggctggctgaccaattgtctaagagctaagagaacattagatgtgaggaaactggcctttctgatactgaacagacccatttaacggctgtaagacccccaaatcctcaggaccttcagctcttccttgttatttagcttccttgtctctgacagaatacctgccaaaatcaacttaaggaaggagacatttgttctggctcaaagttctaaagcacaactcatcagacaggtttggcatagcagcaggtataggaaatgggtggtcacattacacatgcagcgaggaaaccaagagagacccagattctgatgtttagctcacttccttctgtttgcgtgatgtaggtagggctctagcccagggaattctgttgctcaccctgggggtaaggcttcccacctcagctagcctattctagataattcctcaaacatgggtacagtggtttgtcccctaatgtttctagatcttgtcaagttgataaataccagatcccacccacattcacacccatgttttcacaatctgtcttttctcccctcatacttgaataaaaaaaatgaatttaacacaagcaatgaagattcctgatttctttcttaagcccatggcattgagatttcctgtggacctcagtggttcctattcttgtttatttcaatgagttcttgcttggagaatttgacagagatcagatgtgttactttgaatataatagattctagcatcttggtgggcagagcatggccaagctcacacaagtgcattgtttggcactgagagagtgccagttgctctccacagacttctcatcctcttactgttatagtcattatattatggtgaccctcacagggaccacctgaggaaatatttggcctggtttgccattgaggaaaccaagactaagataagttgatatagcttgatcaaggttgcacagttcagtaaggtggagccagggatcaggccttttataattctgacatagcctggctgttgtacacctctttcagccactttttatccatggggtctctgcatcagtttcttatgagtaccttatttttcaaatctgcatctcctatggtgttcagctcctcattcctaaaggtcacaaatgttccaaggtgcctggtagcactctctgtacaggacggcgactctgagagtcattttaatcttttttttttttccagaaaagaaaacaagttttgtagggttacatggtatccttgagacaagaaaagtgctcataaaatgcaaattataaggaaaagggatttgaaggaaatgagcttccggcagctttgtaaggccactgggctacatagggactacttagcacctcaggtactcatctttaatatgggaagagcagtgtttcactgtggtattggtaattggtaacagcattcacagagatagcacaaagcatttggacaattgtctctgttactaatccagctgacgctctggctttgcctcagacctgccggctgggatcagatattggagctggtcttcctactgggactctcgatggttcttttttctagtcagctttgagccattctatctgggtggtgctcatggggttgccctacagactgacagttcggtgtctgcctccttgcaggtcagccagctgccttagacttgcccaagataccctgacacaggattcatagaagatatatttgtttaacccttccaaatctccaaggtcccaacagtgaactctaggcttccactagtattattaaaggggtcagtcatcctaattctgcaaagatacatgtattcattactaaagcttgagggatgacttattaattggaagtagcaaaggttggcatttgagaacatgtctcatgcttcatgggtcagcttggcagtccctatcttaggacatttctccaaattccttttcatgcatgtctgactacaatctaatttaggttccatactatgttccatactatgttgatttttagaagctgtcacatgaaagacaatcagtgatattaataaccagcatcttgaagtgaacacctgtctgattcttggtacattgtgtccatatgggcaatcatgggatagaaagaaaacctggcctctatacttagtctagatcagatttaaagatcagttgggctactcatgagaatagtctcttgtgctgatataaaataaccaagtggagaacttggcctgctattgagatagagggggccaagaattttctgagggctagctgtccctatgctctttagtactaggagtactaggagtagcttatcaaggactctgagaagaactggatggatccctgccccacttcttcatgaccccagtgagggaaatgacatatgtgagaatgtgaggcccagagcttttgttaaaggtcacttggcctttctctacctttttttctaccacaaagacttctgaagtgcaattgttcaaacaggtgctttggagaaagaatctctggtatacctggatagcaatggctgaaaattcctgaagcatgtgaactgtggcagggacaactggtataccctggtggcattctaactccagaacagtaggctttgtctgagcttatttttaagcttctgtgttccaaatctgtagacaaggtccccattcctggatctgttgcccaatagtttgcaagaacaccagctggtcatttgggatggcctcatccaatgtcccaggcattaatgagaatgggtttctctgcagccgttctgaggaacattctaagcagccagggagaggatgcataggtgggtttcccaagggcagaaatgaattctgctgcccttcctcaccagctctggctgggacctgagggatcctctgctctaattctctccgggagtctcccatggctgcctcctctcagctgtccattcatagaactctggccacgaacatcccagctggcagcacccacattatgcttgagctgcttttggtaatctgcctaatgccctaatatgcaggattactagtacctgggggaatgcccatgttctgcagtcctcccacccaggatgtgctagaggctgtggtgggctttcttcttctatttctggcagtggggtgggcatgaaaggaggacagttcttcccactgtagatctggggagccctaggggcacaggaccaacatgatggtttgtatggaggcatggaggtatctccttcccttggggggatattttgagtcatgatatttcagagttttcagcccaagtaggctgcagaatgtcatggtcattcttgtgaaataaagccgaaatgggtatatggaaattacagactccccctcccttaaagtcacaaccactgatgtgtaaatggcacagagccttgatggtgggcaagagctcaaagatgcgttgatcagagtgccacaaggcctgggcctccctcccctgtccccacagcatggttctctgtggtcccccataagactggggctcctaggacacagaactatgggtttaactcactactccttgattcccaggtgtttctgttcagagaaaccagtcagggtgacactgggctatggacttcccaaggacaggtccagtttcaccaactgtcaccatctgtctggcaggacagaagctccttgtgccatacgtccagctgggggcatctgtgtgcaggtgcctggctcagcctgacagatggggaggggcacagagaaaggcatggagtgtggctgggaaggggtttaagcagaaggaacagtaaaactcagaggggaatctgtgtgtgcaggctcagggaaaacagcttactatgttaacctggaaaatgtgaaagcacagtggggccatgaggcccaagagatgaaagtttcttgttcttgccttctacaaaggctctctagagttggtcgtttgatctgtcccttggtcctaaggctctaggctccagcatgagtttcccaggatgggagatgcatctagccccttggatggtccagagggaaacggagaagtgattttttttttttctgatcacaaccttagggcatacaggacccaaccagggaaagaaaggcctagcacaccgaagccctgataagagaggagctgagcctctggggatgtgaaggacaagggataaagtcagatcttctcctgcatggtgaatctcagctctcactaggaaggttgcacatcctgtcagccacccatgttcatttccagtttgacattcaactccttgaagtaggatttatgtttctggagtggttcttggaggacaaaggatggtgttcctctgaccttgatttaactaacctcccgaggtgtaaggaccttgaggacagtcccctgaggtacgggtagtgccagaagtggctgcactgcacacatggaatggtgacagaccgttcccagaccctggcagagtcagtcacccccatattcatcctgtcctatggccatctgtccctgagatggcaggacagatttgtgtgcccccctccttttgctgtcagacagtggggtttaaattctgacagtgccttcttggggcagctgtatctggtaaatgaggacattagcacctacctcataggactgctgtgatcatgctcataatggcagccagtgtcattatcattactgtgctttttactaatattagccagatcctgtgcctgccaagaactgacgttcatttactgcagctctcttctatgcccctcccccttccctcttcctcttaggttctccctttcttcttttcttccttcttttcttccttctttccttccttccttccttccttccttccttccttcccatattctgcccctcttccttccttctccccattctctttcctccctctttcccttctctgttccccttccctctcttcttcgttctcttccttccttctcttcacttcttctcttttctccttcctccttcctgtctctttcccctctgtctccttccctcttcttccccttctttgctcctctccatagccccccccaccatcctccttcccagccctcctctttcttcctctacgccattaaaatgaatttgtacttactggagtctgcagtatttaagctgtaaagctgacagtggtctctcctgtgtagctccactgcagtgatgaaagtacatagccttccagatagacatgaaaaatcttacctagacagggatggtatgtccactagggtggttaggaaagggtcagggatcagatgagtgtctcaggcaacacccaggagacgagtgtgtggatactggggccgagggagctaccaatgctaacagcctctatgtagaggtagtcctgaacagttctggcagcacggggaatccaatgcagctgcagtgagaggagtgggtttcagaccctctggtgacatataggaatgggtgggacagtgtgaggactgacttgtcttcagagaagagaggggatatttcagaagggtgttgggcacagtgacaaagtgattatgattagcttaaaacaaacaaacaaacaaacaaacaaacaaacaaaaaagcctatattctcctttccagatgaccattgcctgaactactcttgaggctgtatctggtctttgctactacgtgggctcttttttccagtctttatacccctcccagtttcatacccaacaccagacagaagagaaaaaggatgagatagagagagagccctaaatctaattcttttgtttcttctttgactatggctgctaacaaacaacattcaacctccctaaatggccaacaaccacactctcagggaccctagtatttatataccctctgaaacattcccagaattccaaaattcacacaatcacagaaattatctgcagctggtaaaaccacatgtctgttagagcatgaggcaaatcatagtcagctgctgcagacagtccaaagcagccccacatcctaccggaggggactgagaccattctgcttttaggtgtctctcagcttcccatgcctactttctctaaagactttctttaccctcagactgcagcacttaggctagatgcaagtccaccatacagctgtgcctagttgagatgagtgggtgggcggggcttgggatagatagaactcaggggcctctgaaagaaagctgagggactctttactgggactcctcccaaggtggacactggtgacggggatggggaagctgtagcacagactcagtactcagggtgggagctttgccagcactactgccccactcccacttgtttctctgcctcttctgtatgcttctgtctcctcctctaagcatctttgtgtctgtttccatgtctggtggttggtcctcctgaggatggagcagtgtagtccaaaggttgcagcgagtatctctcttggtaagggagaagttcacacagtgatatcctgccttctcttgtcagtggtagagtcctcttcagggaagtggcaagtttgggggagttggatgggtgctttgccattcagggcaaagcatgtctgccatagaagataaggggagacacaaagtcccaggacccagaaactgcctcactgtgtacaaccctgtccctccttggaaaggagagattggtcctatggagccgagagccaggatgcatctaagacatcacttggtttagcctgcctagtgtgggaattccccctagctgtgctggatagggtcccacagtcttgctgggacctgcagaagtcttctgttctgttgtcactttaaggaggcttactctagaccaatggccttcccagggcccagtggtcctgggaagctgtgacaattggggtctcacttaacaccgcttgaaccgctgtgcctttcacaccttctcagagtggggtgcttctccccactctgcacaaaggacgcaaatgttcagagtcaacatgaccaaagggagtagagtacacccaagtcctcgtgggctctctgctcataccttgagcccttaggctctctgctgtcccaggtgacacctgctgtcaattactgactctgtaaaatggtctgtgaaatggcatgtatctgctggatttaagaaagatgaatgcacagaaaaattttacatcctaattgttaaagccagttctgacttcataggtggggatcatcactgctctagtaaactctatttaccctaatgcctctcacctcccctctcacctcctgcaatgttcccagcagggccactcaaccctccaggtcccacccccttccctctggtatgtggaattataacattagtagaggggtgtgggactttgccttctaagcacagaatcccccagctaacctggcaggctggcacagggcttgctgcaactccctgcttctgtggcccctcccccagtcctgcctcccacgtgtggtaattacgctcacaacatctagtgtaagcaaataataacaagggcattatcttctgttagtttgtgtttttccttgcctatcataaagcaattaaaataatgaatgccttgtaaaacaataggtaagagggttggtgaaatagcacgctatgcgccgtatacctcttgtgcagtgaattatagatgcattaaaaccatggtggctgcaggggactccctgcctctgggccttttccatgctgaaaagtgtctgtcctttgagacaccaggttcaagcagcaggaaattggccctcagaggtggcagccagagaccagttggctggtgttatgtgtagctcatttggtaagtgtgcttgcctagcgtgaggaaagtcctgcgcctgatttctagtactgcataaagtggtagtggtggtgtgtgcctataacctcagagctcagcaggtagaggcaggggagcttaagttcaaggtcgtctttgtctatataagttaaggcacttgaggttacctgagaccctgtctcaaaaacgtttgggttgaaagcacatctttcccttagccctcaccattcattggcctgctctgaaagtagcaggtgattctggctgaagaggattctaggagcgggctggggttaagtctgtcatctatttgggataaacaaggcctgtggttctctaagtcaacctcaggaatgaacatcagataaaactgtgggttctggagcaggtctggcactctgagtagccgaataccacttgggcttttgattttggtgctagcttgagcctgagaaccagtgcactccagtgtcaatgtcagatatgaggtggaggtgggacattttgggacttggtactgagttgctgttatgtgcctttgggcactgtttcgttctggggagctggcagttttgcccctgtccccatctcacagggcattccctgaagtggtaggagggctaggtttctgtttggactatgtaactcatctgccatggctgacaaagatcacatcctgccagtcctcctggagcctcagcaccaggactagagttaacagaccactgacaccagcctcggaggcttgagcagcagatgtcacacaaatcagaggggccccaaggcctccttccctcaggctcccactgggcttgttctagttcctgctgcttaaagcactggagagtaacctgccatgctcatccagtcctccagccccagcttctcagtcctactctaccagagccaggggcagctggaggagagaagcgggagtcagggacatccccaagaccaacgactcacccagtcctcccctcccccacttccctggtctcactgtgcccacccttctcctcatcaaaggtttccacctctgcctttggttcccctccccagtcccactttagtccaaagcacaatgatccccagtgtttgtctctttgaaaatgaataccagtattataagtgatgagtataatttgctgacatctttttccatctccatctgcattaataatctcagtgggtgtttgagtaggatctattgaaatttgattttagagtgacgagtctctagtgtatgtataacccatgtattttggacatatttatagagatatttgcttacctggaatttaaatttgactgagcattctatattttactttgtatccccaaacccagggctctggaggtgacaaagagcagatactcagaattctttgtagccattcatccaaagtttagatttcttggggttgttgttgttatttttgttttattttgttttatttgcttgggctctgtggtccaagctgactttaaacttgtggatgatcctcttgctgcagcctcctgagagtacaggtgtgggtcaccatgcccaatttccttcatatttactatgctagctttgtgtttaggactgtgtcaggtacagcagtgttgcagcaggggatgtaaatgaaataaattagtgaattatggactgtagatagagggttcaagagctatggagaacagtgaaacaaaacagtgacattgggagaagagagttaatgtttttcagagggtagtggttgagacactgagagtgcctgggtgaaaaacataaggaaacagaggcagaagcaagccttgagtaccaaaggatgagagcaccctagattcggcactgtgtgcaaatgtgtaccagcttcacacgggctctggatatctgaaggctctgtactttaagcatatttcaagtctgcaaggggaaacttattgcctcttgtaactcaaagaaccggactttagacaccgctggatgaaggcattcagatgatgacattagtgatccatgttgtcttcctttcagggaagggttcagtttccctgactgttccagcaagtggaccatacttaagtcttattggcttggcagaggtcatctgactctccctagtccaagcactaagggatagaatgaatgacctatctgtctgcatcattgctagatcatcgagaggccatcctgagtccctttggaatggcatagatgccgagggaaaggtggggcattagtaaatggaggaaggctggcactaggaaggcagggtgactcgtgcagagactttgtgaggattgtgacttagcttctctgtgacctgaggcaggcatgtgaagtggtcaaagaacagtgcagcctcctgtctgtcccaaggccgttctaaatggaaatttacgaaaggattcttcgggagccacagcacgcacgtggaggtcagagaccagttgggtgtcagtcttctctgtccacctcgtttgagctagaacctctctttggctggtctctgttgtgtatgctaccaggctagttgacctgtgagcttccagggatctggagatcctgccgtctcagtgctccatctttctgtgggagtgctgaagttaagatgtactctaccatgcccagcttgtcctaggtttggaggacttagtcttatgttcttgcacatgcatggaaagtgctttacccattaagcaatctccacagcttggtttttaaaaaataaaatccttagggatctctccttccccacctctgtatctttatgccacattccctcatctgggaaaccctttgggtttggattctttatgggtaaggatctgatttaaatccagctgtttcctatgtctcaactctggttctctctgttgccaggaggcccagaagataaacaatggctccagccaggcagatggtactctcaagccagtggacgaaaaagaggaggtggtggcagccgaggtcggctggatgacatctgtgaaggactgggcaggggtgatgatatccgcccagacactgactggcagagtcctggtgagtccctggcccctcctatatgaggtggtcttgtatctgcaaagggggtttgcttgtgagaggtgatgatgctctgatttttctccaggtcacctggggtgagtggccagtgctccacggagctctcagatcagcatggttatcttcacacatatctaagcctgcagtgtagggccatctgcagacagtaggccagcattgtgcactcacaacctgcttgcaggttacaccgaactttctcagtcagtaaaacagatgtacacatgtgggcacaaaatctctcatgcacacaccatacctgtatgatctcaggataaagagtggggtatagcaacataaaccaaaaccatgcccaaagtttgtcagtccagggctcaaaagtctacctataccacttatgagagagagagacagagacacagagacacagaggcacagagagagacagggacacagagacagagactcagagatagagtgacacagatacacatagacacacatagacagagacagagagacagaaacagagaaacagacacagaaacacataaagaaagagagagggagaggaagagaggagaatatatgtgtgcgtttaggcacacgctcatgtgtgtgttggtttatacaagttcctactgctgtcctctagtgacttgaagaacttgcttgggttcattgtcctattctgtagtgtgtgagcgagctcctgaacagcttctggtgtgcatgtgtgtatgtattgggggtgggatacagtgtgtatgtgtgatgtatgtgtgtattggggtacaatgtgtatgtgcaaggtgtgtgtgtgtgtatgtatgtgtggggtataggtgtgtgtgtgtgtgtgtgtgtgtgtgtgtgtgtgtggtatagtgtatctttgtgtaggggatatgttgtatgtgtgtatagtatagtgtatgtttgtgtgtgtgtgtgtgtgcgcgtgtgcgtgtgtgtgtgtgtgtgtgtgtgtgtgtgtgtgtgtgtgtgtgtgtgtgtatgcatgctgtgttcttatatttcttaggtgccctgtttctgattctgtcacttaggccctccacagttagggttcacacaggcacaccttgcctctcttatctacttatagcaaacttggcctcaccagtttgccttgtgagcccctgttttgggttaagaatcgtgactaaggcaggcttgctggggccaaagggctactgaggttatcagtgtttcagtgcaaagaatggagaagaaatgggcaggtggggatgtcacttatccctgccaggcccatgacctagcctaggtggcttcctttcctatttcagccctggttggtggcttccttgggttttctctgggtcaggagtttcccgctgatgcagccaggtaacttatccccaggactttgaaatatgttctgtgcaggtcaccttcttgggcttgaggtaggggttcagccaagagttaattggctggcatttagaataagcagggacctcatcagctactggatcaaagatcaagctgggacctggggtactatgtctagttccccagaaactgcttcttcagcaagaaggtgaatgcaaatgaagaaggggaggagagtctcactcaaatccttactgtcagtgtttaggataggtgcctgctggagggagtggggaaggtactccatgccctgcatgaggaactcagccaaattatctggtgggagagcaggaccctgggatccaaggaaccttctttgagcttaggccaaagagttaaattggcactagctgaaggctgacttcaaaagaggggaggtggacattggcacttttgaggacagagaaactggccagatcagttgctacaagggggaaaacagaggacagttaggacctttgtgaaccaagagaggatctgatgaggatttgcatgtggcttgctgctggagtggggggggggggggaacgggacgggacgggactgtcatttatcccctcatctaattctataggtagtttctgttgctcttccacacagagatctgaatagactttgccctagagacaaccgaggttgggttctgggtctgcatatgcttgtgcaacaggggcaaagccatgccttccacatatatggtggctgctctgtatagtaatgagaatgatatatgatagccatactttgaattttgaatgagcaagtttaagaacataagccaaagtaaaaggggaactagcacacagtgtatagatatccaagtatcatcaaactggtgtacaaagtatccagcagacatgacagacatgagctggaaaaattgagacagtcaattggaattcccaaattgaatgtccctccaccccatgggtaagcttctcatggctgatgttccagtttctccttcccactgtaggtactttattatgggatgggcagtagttatatccattaccactactagtactacattattgctagtgtgacatctattattatcctcagcctgttttaccctccctgtcacagagattgtgggggcagtccaccacaggaaaggagccttggagggctctgagacaaacctgcttaggtctgaaatagggaaggagcaggcccatttcagagtcatcttctatgtgagcccatgcagcacatgatgatagtttgccagtgtaatgtatgtcaccacagccacggcagacacagggtggcagggagggaatgatgtcatagttgcacttgtccaatcctcttgtctgatgaggtgggaaataagcacggacattagcagtagagttcttgcttagcatgcaccaggtcccaggttcaatgatgagtaccaagaaatctggagaaaggctaaatgtgatgtgcatcctaggacttgggaggctggggtaggagaatcacaagtgtaaagaaagcctgtgctacacatcaatatcttgctttagaaacaaacaacaaaatttctgaccagagggaaggggggactttttggttggtcagcggtcagctaggagaagtgcctaagacagaaagcttgctcactctttagtttcccctttcaaaagtagatgagcatcttgaaagccgaagggaggaaatgatgtcttcaaggaaagcaagttgtatgagcagcacatggtacatcattggactctggagattggtccaatgaggccaagggccaagaaggccaaggcattgagtttaaagaaggcctggaaggttgcctggagacagcttgtctggcctgagaataccaagctaatgaatttgggcagagtttctaggacaaggagattttgacagtggggtactgtggttgtctgccgtatagccacctgggtggaggtggctactcagagggagagctcctgagacaacttagggtagtgagctgctaccttagtgatagcatgctagggaagacaagatttgaagtgtaggtaggtcacaagttcagggaggtagagataggagtgatgttgtacggttggggagcataaggccaagcactacccaaacgcatcaacatggctaatgatgtactatcaactatgttatggaaggcatcttgtgagccctgtactgtgtcagccttgttccttgccatgggccatgccattgtattcactcacatatcctacatagttgttgggttgcagggtgttctagtttcattcctgttgccatgattaaacacccagacaaaaaagcaacttaggggagaaggggtttctatcagcttataattccaggttacagttcacactgtgggaaagttaaggtggcaggaacttcaggagatgtcaagactagataaagaacaaatgcatcatgcccatttggttgcttatttgtactcagctaggtttctcccttaagacatttgggagcccctgcctagggaatggtgctgcccacagtggacaggtcttcccacatcatttaacttaatgaagacagtttcctagagacatgtccactggccaacccacagcagacaatctgtcatcaagtctcttcccaagtgatttagtgttgtggcaagttgacaattacagctaacatggaggctcatcacaaggaagtaagctaatcttaccaaagaatctatctctccttgacaactgagaaaaagcatggctcagggagggattttgtttggaaaagagaaagcaaagcagctgttagtggcagagccagctaggtagatatatggacctcagaggctcagctcagtgttccttctggattatgactgcctaggtaaggacaatgccgtttctaagtctctacccaatgttgctctgagtgcgatgatctaatattactgtcctagagccagccaggtctgagaccccagtcttgaccatcttaaccctcacaggtagaagcagcttcaacccaatccttcttgcttagggctgtccaaggtgttagctgatctctggtctccttgaagaaagtcctgccaaagtgctggatccccttgaagggatggatccctgcagcacagagcagtgtctcagaagactttgaggagaatgcagagcctggctttgtacagaacacagattttaccagcacacaggacaaagctgccctgcatgatctgagcccaacactgtgtttgttttgagctgtccagatgtttatccctgtgacagtgggaccgtttcccttccccagttttcaatctgttttctttgatgcatgcttaggagcttgcaggtgagactattaaggttggaatatggtaggtaaggtctagctggggaaggattagctaagtagcctagattatctgtaacaactgatcttgctaagtaccacattcatttgataaatggtaatttcttaacagctctggctgtgtactccatacaggcacaaaacagtgagcaaaaacaaacaaacaaaaccaaatgtgagttacgcatactgttggattaaatagataattgtctagttccatcccaggaatggcaggtggtcggcagtattcagctgggcctcagcaccaaaatggtcagttctttgactccaaggtttcaggtctcagtctctctccttaggatcaagcttcctaaacaaaaaccagagaggctgatgggtggagctctcctctgaaacacgggcctaaaccataggttaacagagtgatgccatgcagacaaggtagtctcttcctttgtttcattttttaaattaaagaatattttctttaaaagttttaataaagaaacaaagtggtgtgtgtgtctgtgtgtgtgtgatatggttatgagtatgtaggcttatgtacctgtgcagctggatataaagaccaaagcagggcacccagtgtcgtcttccacattgcattgtgagaaagggactctctgaactgagaactgaacatttgggctaggctggcttgactggggctcttgtgatatgcctgtatctgctcccactccaccctgtcagggttgaaatatggagccatgcctgactttctaccaaggtgtgttagggattagaactcaggtccttatgcctactgcatactagctcttaaccacttagctacctccctagcctccaaattaatgactgtgaaagtaaaattgtgtctctctgtctgcaggtccatcatcaatgtattcaatcaatcacctatcaaaaatattggggcaaaattgcaactcattgaatgtgtatgtcctctttttcttccttttcttttcttttcttttcttttctttcccccccccctctctctctctctctctctctctctctctttctttctttctttctttctttctttctttctttcttttaatttttgtcatccctaatgaacatagtggagcagctattaccatcacatttacactgtgttaagtattgcaagtaatctagggatagtttcaagcctacgggaggatgcgcgtaggctttctgcaagtactacaccatttatataagggacatgtacatctttagatttgatacccacagggagtcttggaagcagtctcccacagatgctgatggacaatcgtagaacagtacatgcttattttagaattctggaacatgttggaagaatcgctgagaagttccattttaggatatggagttggcctacactcagtaagacttcaatatgaaggaagatgtctttaggattcttctcaaatacttgggcgttgctgaggatcacgttgcctatatttcacctaatttacttcaggcacacactcccggagaaattaaataagctgctttcactagaaatcatggatttgtcagctagcaccatgattattttaagttggaaaaggggtaatatttggtggctgttgtgagccaaggttgactgacctacacagagaagccaaagtttggattttatgtgggctcatttctcctacttttctcttttccattctctttccttctctgtcttgagttccttaattatttcctaatttgtgtgtgtgtgtgtgtgtgtgtgtgtgtgtgtgtgtgtgtgtgtgtgtgctgttaggtgtttcgtacatttttgtgagccagattaaacccttgaaggctgaagtggtatctcaagacagggggcaagaaacacatgggccagcttttgtttgttagtttgtaaattataaactcacaaagctaaaatcaatgaaaatattttagttcaaggttggcaaatattcctgttgtaaacattgttaggctttgtgaactatacagactccatgttaactacttcatctgccattttgatttgaaagtagtcacaaacatctacactgtttggaatgtgtattccaataaaactttattgacagaagcaggtgatggacccatgtgctttgtttcataagtagcagtttattctcttactttataaagcaatcaaaaggtaagaatcttatagaataagagtaatagtagtggagaatccatttacaaggaagaaagatgtagacacacacaaacaaacatacaaacaaattgccccctcccccaatctccacaaacattccatttctgaatagttacattcatctccattgttctcggagcaactgtcactctaagaaacctgtcttgtggctaatagtagctttaccacaaggtttgagccatgactgcattgcctggactttctgtcaaatcgatgacagatgccatggtttgtgattctcttaaagaactgatttccccaacacagtaactggctccctgggcaaagataaagccattagcattgttcatgttagttcattttcccacttgcttatgctactgcacttgaacgttgctccaggaaacatgcaaatataattccaccaactgaaaacatttgctatttgctttcacgtctaggggaggctttatcaatgtatggagaaacaaaatgccagtctcaccctttactgttcattctaaataggtcacatgggtatcatttgacacattatatacccaacccaggccattttattcttatcttcaggggctcaagagaaacatacatgctcagcatgcctttcaagcagaagccactgcattgggttaatggggtaaagtagctgtgctgtgcctgctgaactgtttgaacatggcacttgatcagtgaacctgaggaggggtgcacatgggcaccatgaatcttctttgtgacatgtgttactgtcattcattacttaccatggggggggttgggggtggcgctgatgtgggctgtgtctcttgtgtgtatcatagcccttatcagtgaaacacggtagcaaatttgcacacagcacacatgtccattttcttccctcttccccacatccattctttatcctttcatattttgggcaatgctacataaaactgtcgcagcatcaacagttactctatagagcagaaagaataggaatctttggcagttgtattatgggtagtgatgtattgctgcttctcttctgtcccattggaagccaacaggttttattggcatgaacacccttaagggaggggggttgagtcaaacgactcacatagtaattcaccaataggatttaaattatgcctctttattttatcctgtgtgagtatgttggtgttagtcaggaaatcatagatgatatgttatatttttatatggttaagtaactgttttgactttgatagaagaggcaccagagttatgacacttgttatttgtgacccagtaccatttattcagatggaagagtatgtcacaggagcggttgcactgatcaggctcctacctcaggttgcgagctgcctgttgctagagatgctcacaactgtcttctgacataactaccaacaattggccaagctgaatcctcactgctttaattaagtgccattgaatgcaagagatgctttgggataaaaatgatcctctgggaacttgaacagacttcatttcctagctgatcgtggggattgcccatgcatgccagcctatggatgcttacagaggcatctggagcaggagcgtaaaaagcttctgtactcacacaaacttctagtccttttttttttttaatttaaaaagatatatttattcacatataatattctgggggcagggcacgtcacacaataaagtcaacaaacaacttgttagagttagttttctactttctgttaccatttgggtccctgggattgaacacgggtggtcagacttggtggcaagcccctttacccacggaaccgtttcactggccagggcagcttcagtccttatttccctatggaatccttttcccatagcacaggagtgacgccgctgaacctacccaaccatctgatgcatgtgggccagagtggttcactgctctgttggtatggcttaggagcaaaagatcgtttttcgtattttcaaattactttagaaaaatctaaaacaaaatattttgtaacacatggaaagtatacaaaattcaaatttcattgccctcaaaatttaattgtcataaaagccatgcaagttcatttatattgcagctgtggctacttttgtaacacagtacagtaaggatacaaggagcatccatagagtcccaaactctcaccagcctaaaaacagttactgtctggtcccatggtaaaaaagtttgccaccctcccttgaaactggtgaaattcttcccaaagaattttctaagctgcccactgcacaaggtaatagataggatgtaatatttttgcagtctctgaacaatgcacctatattgcttccgtaagctcaattgagtcttaagtagagactaggaagcgatagaagctgggctgagtggccccaggctgctagcaagttctctgttgtttgttcttttagcaggttcagcctaggggctggacacagtctgcttctgagatcatcatagcaaagtcaccccttgcactttctctcatggctaccctcctgcagtctgctacccaaggcccttcatccccgacatccacagatccacagcactgtccttccctctcactgaatccttgtgtgaggaccatcctgattcaggtctgtctataaggcggggtctcagcccaccctggctgctggcctgtaaactggtactcagtgtacccagctccccagtgtgccccgtaaaaaagcccagctgctaattttactagctggcaggatggctcctctggccttcccagagcagatgggaaaaggaaggacagacttagaaatcagacagctctggagaaagaaagatccttctggcccaagagtttcatgctgaacaccacagtgtccccaaacattgttcatggtatggtaactcctatgcctttggatgtccaagagaatggggcctggataggggtagtacctacttttgcttttatctcaaccatttgcctgaccacctctctggaactagttcccatatatttattggtatattataatggaatgtcccttcccgccctgtttaacctctgttgggctgcaagctaggagttctgtccttcaagaagggtctgactgggacctcttttcagcagcttgaatcactggctaggtcatcagaacataccaggaggtgagatggaacactctgtaacaacaaatattctgtattcctggcaaggagctgctgcggtatggtccttggaatacagagggcctctgtgtgtgttgtggctgaagctgcagccaggctaccatccctgtctaacctctcctcggggctttcattctgggccaatagcttcatcttctgaagccacaatttcttcatcttgctggtggggagaatgccagactctgggtcttcctgttgtggtgataagttcttgaatgcatgccagaaaactgcctcttgtgtggctagtgctcaataaacattggctcccatggtttgtgttacctgtcagcccaggcacaatgttatagtggctgtcacggagagccatgaaggcagggaggggaggggagagggtaaaacaaaatttttttccacagagagagagagagagagagagagagagagagagagggagagagagagagagagagagagagagagagagagagagagagagagagagagagagagatacagagagacagagagacagagagagagagagttctctaaacactgagcaaggctgctgggcagttctgggtatagctagccatccctcatgtgggtctagtgtgggtctagtcagtcagtgtttgtcctgtgcacacccttcattcaggtccatccagggtctggtcttcctgagactggactggctcgtgccagcctgactcatcgttgtcaagctggccaggaaattctcacttcatatctagcctccctgagctgtgcaagggccagaggtggggttgtactcagctccctggagctgtccttgtgggcatgtgtgtcacaggaaaacctttaccaggataacagataagtctcaaggaaagagggtcaaatgcattcagtatggtctccatgcccagttttccctcgagacagagtgagcctgacagagtatgtggctgatttcagtgggcatgtcaacagcaccatatgtgaagtgtgtgtaacagccattttggtggccacagacccattgaaaagacatggaaaggtgtggcactttgcagaagatatgggtgaacatagtatgtacatgaatgtgtaaaagtatgcatgtgaggcatgtcctctggacaactattggaaatgagcccccattacaggcaccagatacctcttgtttcttacagaaactctgcacaggacaacagatgcaaactgaaaaaaacgggatgcttggatgctgtggggagtccctcgagcagacctgggacctcagcatttctaattctagtctcacatcctgcgagtccctgctgctggatcccaaggggtgcataaatatgtttatatgactaacatataagcggccttctgccttactgccctcctgcctcttttccttccttccagaccagtaagagttggtgccccctggaggcttagaatggaataggcggttcggagcttttcagtcagggcatgcagtgattctcctccttgcttctcgagccctcagaggtttagatgtggctacttgtgaggaaaaaaaaaaaatctcttagtgggctgtgactgcctttagaacctccattccagctgcgagaaagtttagtagagagactcaaaaatagagacgacggtggcgatgaagtcgctcacactagggaccacatgcaagctgatgcttccgagtttagtttgcgaggctatgtttaggaggaggcagacggactcgtgcctgtgggccctaaacactccaatctggaggactaggagccccatttagagagtcaggttccagaaaaaggcatcttccagaaaagacaattttagggaaatgataccacccagaagctaccatttggcctcagaatgttttttattataagaattgttctttcaagtttgggtagagagagaaagaaggcttggcagttgtttcttgcctgtctgtcttgaggaatcagaacactcataaacttaattaaatgcacccaagcctcttacgcagcagggctctgttttgcccatctagttaatttcagttaatgaaattagccatgtgctgatatggacagcccgggaagatgaagccagcaatctctgggtggtagcttgggtcacagtgtgtaaaactgcggggacatgggttttcatttaacctgggacttccaaggatccttccatctatgtgcctccgccctaggcaagcataccactgggcctttcttgtttagaagagatggttaatccagacagtaaatggactagtcacaccggctcttccacaggcatagaagtccaggatccagtagacgagctgagaggttcaagaaactctcttcttgcccattgtgtcagccctctcttttcctgtttaatgtcccccaccccacatattttgtgactatggctagagcaactttcctaaggaaagtagaggatagctcaccaggaaggagaaaaaaaaaaaaccaaccaaacaaacaaacaaaaaaaaaaacaatcgccatagttgtctgcacttacaacaataatgccatgaaacagaggccaggtcacagaaagagggtatttcaaaggacaacagttgcctggtttctggctgtcctcaaaccctgctagatctgttggcctgtgaactttgttttgtttgagatggtgtctccctctcaggggcccagagttcatcaagtagtctagaactgatgactaaggagcccagagatctgtctgtctctgcatggagtttggaagaccccagagagccatcttgaccatcctccgagcttctggagaaaggtctgggtgtgatggatttattgaagagtctatgctgaactggttttacggactggacacgcagagaacgatctatctgggtttctgtccctgcctagaggacaacccctggcaaaaggaaagctgacgctttaagtagctgttagggaagctaccatgattttatgatctgggtaacttagtttcttagccacctcagagttttccagaaggtttagattgccgatctgcagaggcagatcgcttggtcaagcgcttgcctcataacgacagtgaccccaatgtaagctctgggaccaacatagaaaagccatgtgccatggtacatacttaataatccctgctctgggcggctccatcctaaacaaaacaagaaacaaagtgtgcctgagagatgacacttgagcctgtcctctagcctccacaaaagcatatttccctgcttgctccagtgtgtgtgtgtgtgtgtgtgtgtgtgtgtgtgtgtgtgcgcgcccccctcccccctccctccccggaactccaggcccagtttgagatcaatccacacaggtacaaaactctcctgttaaaagaactaatggtgaacataaagccacgtcctaatcccgcctctgcagtaaccttcttgagtgaccttgagcaagtcaggacctcagagtctccatgggtaaaatgataagtgtcaggtgttttagagcagtctgttccttctcaggctccccaggctctgggctccagcatccccctacttacttacagccagaaaggctcatgggaactcgccttccttagacatggaaggcacttgaccctgtgctcagcgctgggagagctgcacgctcgtctttttcttggctgttggtcccattgggaggatgtaggtagatctgggaagtctcttcctggccttccatgaaggttagtgaatggtctcaagtcttcttctcatggcttacaggcctgggggggggggggcgtcactgcttttcactcacctcctttgatcttttccctgtctgaatctcttccacatagccacaaacatacaaagaaggggatcatctctctagaagggagtggccatggggttgacgggggcggggggggggggaggatgccacaggagaaggacctataccttccaaggagttggtttctttatagatgtttcagccttggagcctgcattagatattatttatttaatatttatttatttatttatttatttatttatttatttatttattgctataataaaatccctagaaagaagtgacttaaaggtttcagaaaccagaatttgtctactgtagcaggaaaagcctagggaagtcggtggctcctcacagctgtggcagccagtgcatgaggctggctgttcccagctcaaatggatggagaaacagagagtgtgggccagaaggggctaggttataacccataaggctaagccccacaaggatccacttcttcccacgaggcttcaactcctgaagttctacaacttcccaaagcagcatcctagatgaggaccatgtattcaaaacatgtgcttgtgggaatctgtgctagatccccttactgagccatcttcatggagtcagccttctctaagggatgctcactatgactctgggtgaagtgtgacagtcccactcacctacaatgatttgaagggatgtccttccaccagcctttgctttaggagaccccagatgacagatgtccctctctaccacctgggtagtttttgaaggtcatttttttttttctgtttcagagacaggaacttctctatctttgcatgtatgaatgtttcataagtggcatgtttacttaaaagaatgactgccagaggcaggaaggagtgaggatccgttaatgtggagtaaggtagcagactcagggggctaccaaacaaaaaatgaaaccctacgcaggctacctcccaaagttatgtgagggtacccaacgctgtgggtgatccatgacattcagattgcagtcgtttcccaaatgaagcttcgagttaacttcctagatgagctgaagaaaaacaactgccacacgccctcagtggactatttcaagtgtttccaatttaattaacatgatcctaagcaaaggatgtccacattcttgggaggaaggcttgtccttccctggtcctcagtgatgaagcattactctttgtcagttcaccttctcaggtttttccccctgagagtttgagcacaggaagccagtttccatagtcccctggcctgaagggagctgcacactgaggctcatggctatactattgaatagaccttgtagacaaaactcagcaagacactcaaaaatttataaaagcttctttttctttcgccctggactaagatggagagatgaaggtggaactggagtggggggtggggggtaagaatttatttctctttcatctaggtttgtgtctgctacagcctctggtcctaataatttctgctgtggaatttaattttcccagacttggattcctcctccttttgccaaaggtagtatagtctggaaatgtgaagtgacaggagaaacagcccccacttcctgcaagataattttgtgtacattaaacagacacattaagccatttagaggagaggtgtttgttctccggagtctggaggaaatctgaatttctaattctggactctttaataattttcaaaagaactgagggtactaattaactgtctttgaacttccttaggctgtcatctatgccctgatctcaaagtagggactgaattctctacctctatgagattcttagactggacaccagccttgggggtggaattgaacagactttgagatgtaaactaatatacagaggggaaaagacacaaggtcacatttgaactcccagctttgagtcaaggcaagaggctttatgctatattttttccactctattgtgattgctaagtcttggaaagaaagccaaaagagaaggaaacaaacaaacaaacacagtaaaaatacaaaacagcagcaacaagatggggtaggacttaggacttagttgagggtgtttaggacacagactgttttcttgctcttgtatttaaggattgaaagagatctaatccagggacttttcatttcctgggtccattcaggtggtgcctctatagaaagctttgccaaagatccacagctctgtaataaagagctgccaaggctctgccctaaagaatgtgactcatgagtaagttctgccatgagagaagactagaaggtggcctggccagcatggctgtgtctgccttagctatttgagaccatgtcacttgcatttccttaatgattaaactgaggtttgcctgaagtcatgcagttcgtcccaggcagggtgctgactagaacctgtctcctgatcatgtgtagtatgctgataactcagatctgtagggtagatctctcagagaaccaggaagcttgtcagcttcctgtgtgagccttttgcttttccttttctcttaaaaatttcttttcatactgcagcctgacttcagatttttccatctggagatttctttttagtgtttggaggagcagagggggcggatttcatagccacattgcttcggcagaaaaacagaaatgcagttttccagtgtgctgtgtccactccccaaattcttttagcacccagcgtgagccagtctcggccctcctactataaagttctcccagcccactcctggggtccattctctcatctctacagctgccttccctgtgccccactcccccagtaccataaaaagcttgtgggggctgatgacgtcatggtctccttccttcatagccaggacctcctatttcttcctgtttcccccgcacccccttcatgctctttcttgtcagctattcatactcacatcttaatggctgtgcctacaaagataaatacgttttgcctctgaccaaaagcagtttctggtctgacttgaatttcagagtctgcctgagtttgcaggaaggaagcaggggcagagtcctcggtttcatctggggagccataaaagtttgctaagagtttattatccccatcaagatgaaaatggaattccaaggcttcagatatgaaagataaataaccaggcaagcttccgcttccatgaaagccaagttccctttgctggttttatgagtctacctgctgtgccctcaccctggcattcatctcctggtgatgtcagataaagccttccccggggacttatgcaaaactgggatggaatagagaatttcaggccattggaggaatttgcgagaaggatgactgatcacattcttggatgataactgccatgcaatctcagtacttgctcttctctttccagtataatgggggttggaataaaatgcccattaattggaagatccaggttggcttagagtctagggttgtgaattatccagcctatgggcaatagaactgcctatagttccacacagcgggtggcggtggtggagcgactcttacatttaaaggtgcctaagattctcagatctgactcgcatgagctgctagtgaggacagctacgaaagatgcctgcttctgcatacagtgtgagtgctcagagactccacagctgcagtgagcctgcccctgtgccactctgggtggccattatttctccccagagcttgcttctgctctttgtgattggcagagtctggtgctaacctctcagctcctagctgtagcaaagtcctataggtttgccttcaatgttccctcccttacagtcctggctgaacccctggacttcttgctttactcaccctaccatattgtgtgtcatgtgcctcatcggcccacttagtatcagctgctcattttgtgtgtcatgaccagcgatatttccccaaatccaacttcgtttaggtctcccaattggctttgtgtggtctaaagctcagattctttatacaaatgatgaacacacaccctctttctaacacccccccatatactttgtgggttcaaatctgacctcatcttcaaaactatgttacaggtgaggaagccaaggcacagggagtttttaatatcctagggaagaccatgtgttcaatagacctcaggaccgggatcctaggatagaatggcattgatttcttcccctcctgaaatctacagtcttgtctataattcacctgcacacatgtttggcccacaggctgttgagccagactttctgaccttggctctgccatgtactcgttggtccagggacagaaaacaagagtaactacttgacaggagtattatgaagattaaattccctaatatttgtaaagtacttagaacagtagctggcacagacaaggtattatataatttgtttgttaatcaaatatagtaagttgtaggttccttgagaataggaaacatgttgtttgttttataattccctttgtcttatatgggagatgggggaagagagaccaagacttctgcctggcagttgctgacaatcatagtgcaaagaaatctagtttttccactataaccagtgttaagcacaaggatgtaagaatacaagcgtagtgacagcaactgtttagtctgtaagtctgttcccacaacctcgcacatggtaaggatgccaaggcacagaggtttagcatcctagggaagatcaagcatccaataatcctcaggactgggatcctaggatgggctgtcattgattcctccttctgcttcatgcactttccacctattaatgagtggaagaaccagacccagtgccacaggcctgctgtcctaactatacgagaggctgaggtaggggaatacaaattcatggccaatttggacaacttggtgagaccctgtgtcataataaggagaatgttagagatgtcactcagtgaaagagtgctcccttgggatcattctcctccccttctctctctctctctctctctctctctctgtataagtgtgtatgtgtgggtgtagtgtacattatgtgtgcgatgtgtatgatgtatatggtatgtgtgcatgtacatatggtgtgtatatgtgtgtgtgcgccagttgtgtgttgtgtatatgggtgtgtacatgtgtgtatgtgttgggtgtgttgtgtatatgtgtttttgtgtatgtgtatggtctgtgtgtacaggtgtgtgagtatggtgtgagtaatgtgtgtatagtgaatgtgtatgtggtgtgtatgcatgtgtgtatgtgtagtctgtatatatgaatgtatagaggggtgtgtgtgtgtgtgtgtgtgtgtgtgtgtgtgtatgtatgtgtagattgggaggagtgaaagatacaggatatgtagggaagcaatcaaaccaggcatttgttatataaagaaaagttttcatatcaggttgagtaagagcctgaggtcataaccacttatctagtggggcattttctgtagtggacacttaggccagctatttccttctatgaccatgtccagatgcctccacctcacccctctgctgccattatttaatcccccctcagccgtttccttctatggcaaagctagttttatcgtcttctccttttgagtcatttccaggataaaatgtggatgcaactgtgaatagaaaagctacgtcatcctttcctctttgatcagctttcatcataatgggtccatttggaaggtttcatagggacagacacaatgctcctccactggactccatcagccactgaatgatcaaggtgccagggaaaaaaaactagagtgaggctagctggtttccatggcaactgcttgctcaaccctgcatgcatgcttccttctttgcacgtaggtgtgtgtttgtttattattggcgcaatctgccagtgccccagcaactatgtaggtgccatctctacttccacctctgggatcagtctcagttttgagctagacccacagcccccccccccccccagttttgagctagactacccacctccccaggtggtggtggaggcacaagttctgtttggctagaaaatattctccctccgttagatcccatttcatctgtcagcgcagtggtggtgatctcaagggtgctggagatgccgttttagaacctttagagtcagacatcatcttggctcctgcattgagtcacaaactggctggagagctgatactgacgcacaggtctgcacagtcatgtgtgcgttgctgttctctggggatgtccatgagctgaccatagacaggaaccagagaaacctgggttactctcccagggtgactctgagcatctgaggaatggtggtctaaattaagatgacctggacctaggaaatttagcatgactgtgaaatagcacatatctgatttgatatgggttttttcttaaaatgatcacatttaagttaggttagttaggtaaaccatattattataatttttttctttttctttttaaattattaaaaatatcttttattctttaataatttcatacatgtatgcaatatatctggatcatacccattccaactcttcccttgtatctctgaatgtcctttttctatcttcatgttatcttctcttctgtttgatttatttattttttaactagcatgcttagtctagtttctttttatttttaaaagatgtgtgtctcttaggtagatggagtaatgattagagcaatgaactatatgattttaatgacattttatgcatatcctacctcagggaaatatacatgtatataaacatgtacatatatatgcacatacatgtatgtacatatatattataaaatatataaaagtctctcaggaaaggaaccacctcttccagtctgcctttagaagcctggataacatgtctagaagcctccagcataccttgacatatagctcaccagcagaactgggtcaccagcttggtccttagtccatttctgacaaataaaaaggggcactgaggtagacttgagtaactgaggtttacctaggaccctttcctccatcacttgcatccctgaacaaagtcagtgtgctaggaagaaggaagctggggagtagatctaccagaagcagataccaatatgccctatagcagtagttctcaacctgtgggccgccacccctttggtgtgatattcagatatcctgaatatcagattttatatcacaattcataatagtggccaaattacagttatgaagtagcaacaaataattttatagttggggggtcactataacatgaactgtcttaaaggatcatagcattaggaaggttgcgaaccactgtcctataggaaaatccacaaggaggttaatgtgtgtttgtgccggtggacacagtttgaccacttatcctacctggagttaaatattaaatatctgtctataattataaatgaatcatcaataaaatgtaaaaataagtgccctgcaggaaaatgtatgatagacaaaccaagagacagacagacagacagacacacacacacacacacacacacaatcacaaacatgggcttcatggcttgccttgtgtttcttttgagagcactggttcatagcattcatgattgaatacaaagcccagctattctgcctcagtcataggctctgtggccttgaaccagctccttttctgagtctcagttgcttcacctgtaaaatgggactaacagtagcagctgcttcatggagctgtcagtggctgtttgtatgttaacatgtgtaaagcacccaggaaaaatgtattcatgtttaacacacatgaaccaagatcagtggtcacgtgggactgctctggggaccagtggtcattcttgaagtcttccaaatgtctctaacctgcctttcacaatgcctctggctcagatgtggagcaatcaccccacagagaacatttggttggacataagtgaagacccttggcatatgggtttcctgttgatgtcccagctgacatcaacatttcctcctcaacattgaggcagttttgtggaagagaataaatggggaaaatggtctgtaaagagaaaacccttctctggctgccacctcagaatagtgggaattgactgaaatcgagccagccaccatactcacccagctccagaacagaaggcatttgcaatcaggttgcctattggtctcgaactcagagccccactttaagacctatttttaggagttagtgtctgtcaggagaggatttggagaataacccagggaatggggttgtcctggattaaaagtcctttcacagtcaacatttgtgatgaatttgtgacttccaccagtgttattctgacccaagggcacacacggagggcttattcagaaccacgggcaatgcagttctcgtgtgatttgttttcatgtcatcattagatctgaacaagctattcacttcacatcagttgttgagaggaatcgaagcttggtgctacaaggtgccacagggacacctgtgattctactgcgctctaaagagaaggacacagagctagggagagcaggtgacatgcctccagtgcacacattaaaagtatgtcggaggacaatacaccattctccagatctgttatttgatttgtgtacatattcccgtcttctcctctgagtcactgtctgtaactaggagctaactgctgatcatgtttactggagtactaaatagggatggcaagttttaccctcattttccatttcccatatatgtgccatatatatgtgcatttgtgcttttatgtatgttgatgtatgtctgtgtttatgtgtgtgtgccagtgtaaatgtgtgtatgtatgtgtagacctgaggttaatgtctggaatcatgttcaattgttcacttactttgttctgtgagttgtggtctctcaatcaaacccagaactcaccaccttgcccaatcttgctggctagcttgatccagggattcgctgtctctcctcttattttattttattttattttattttattttattttattttattttattttttggctgcaattatatataggctgctatgcctacccatcacttaagtggattctgaggaatccaaactctagagttcatgcttgccaggcaaatgttttaaccactgagctgtccctgtagtccctgcactacagggagagaaggtcccatgtccctctccagtctactgtatctacagctgaggcagccagtgtgggtgattagcctacttgccttagtactgacgatcctggtggcaatgctagaccaagtgggcactggatgcttcctgttaaaaatggcccagcattacaagatgagacacaggcgaggcaccaccagccatgagctggacacagcctcaacaagatttgacctcattaaggaggcagttggccagtcgtgctctacagttggagatgaaaagtctccacagggacttttactgataagctttcaaaatctgaacatccttcaggagagtttcctcatggctctttttctgttgtgtgttttccttcacatgtgcatgcatggtttactcattacagcttctctacatgcctttctctgtgtcttctgctcccttttcctcatacttatctacagacttctcagcatgaccacacctatgtgcatgtgtgtgtacatgcctgtgttggcatgttagatcttctgagacagggtttcatataacccaggctggtctcacacttgctaagtagcaagggctggccttgaaatcctgatcttcctgcctccatttcccaaaactgtggacaacatgcatacatcaccatgtctgacttattttcttttcctttatttttttcctctttcctctccatacctgttagtgctttgaaactgttcatgtaagtgagctcttctgtacttactggatagaggactattttagacttcaagttaaaacaggtaatgacttgaaagtctgctgacaccaagccatcattttgcttagttaaaaaccttctgattgcccactggacaatgtttcttgaagcggtgggaaggtctagaattcctgctgccccatgtttggtctattgccattcttggttatctgctatttaacctaacagagaaatcattaaatgtatactcttctctatcccgtcaaagaaaaccttgctattccccacatagatgaaatatttaattcctccctgagccagggacttctgattagaaaccagacaattaccaaggatgtcagagtatctcatcctggagtttgtaattgaacaataaaaatgtatatacattcagaggccatggaataagactgttaacttgaatcaaagaatgaagagaagagctgtctcttacaacatggcacaaatgatctcatgatgaataatggtcctgtcctgaaattacatccttactgccaagcagtggctgtagatgggaaggttaatggtgatgataattgtgccttgcatttacatacagcacccctgtctcagccacttgttaaggtagttgtcttcagagctggcaggcaaggacttatgtctttggaggtggagtcctgagaggacatcaaccctggatgcacagtattccttatggaaggatgcacaggagccatataggaagagcattttcctcccatgacttgctggcttggtgctgccctgaactgcgtgggttgtgtggctcagagtgagccttgtgaaggaatatgtaaaacactggcaggcggtgggcttattttttttcaagtcttaagtgctttaaatgcctagggacctgaagcccctctgcctctgtctgcttagagaaagcggctcatcttttgttctttatgctaaaagggcttatgcacctctaaaaacagctcctgtttctggtgctttgcaaactaggaaaggaataaacttctgtgagggctttgccttgtctctctctcaagtaaactaagtgctagccattcctatgttctctatgcaaaagggaccttagcatcagaatagttgagtctgacacagcttagtggtctgactccatagcatgtggatcttccccaagagccaaaacttctgaagtgatgaattttattcccttagagtctgaatttctgggcaaaatcataaaactctagctactttgaataaaggataggagtccacccacagaagctcccttcccagccagtgtcccacgccaggagttctggaagaccttgagcacttcaacacctgagcaaggagcttgtctctacttcccaggaagggcctgtcagttcatgccactgcttccttcctgaaaaactccaaagtcctctttaggtgggagcaagcattcaacaaagatttctcaaaggccctccacttccttttgtgagccaactaaaagagctcatccctagatagctctttgtctttcatgggaagggagctgtccctgcctagatgtggatggccatcatctcaaggcctgtgctaagagagaaggcttgaggtgaggtgggaagtgttgtcccctgagtagctgaaggtcagggtaatgcgaatcagaacctctggaggttcagcaggttcaggcatgggatgagctcaggagcaagctgatctggaatgtactctgggcagacttgggtagacctcattagccttccttctctccagatgtttctagctaaaaaaaaaaagtttctggctcttctgattttggtagggaccacgtgctctggagatggctattcaaagaattccccatgtgatatttgacatcatttgtttgtacctaagacacccagctacctttggctcctgagctatgtggagataatgctgttctaccacagagtcttctcttggaaggattcacagccatgtgtccccctgcccagggctgactctccttgctatgcatggagataatagtcatggagcatttgtgatgaagaaaagtatacagagcctgacctctacttagaatgttccagattcggtaggaagacagataaaaggtgtctgtgttcccagggttggattcaggctgccctctggtcaaagcactgccacatgaccctttgcttaccccactttctgccatgttaggagaaggaacatcttgaagacgcagaagacgagacaggttactgatctaaatatttgcaattaacagtaggtttcttatttgatacacgtgttcagtacacagataagaccagatgtgttgcaggtgacgtttcaaaggcagcctctgagcagagctgagagtggatgtttactagagatccttgctactactccaagggggagagggaaggatgtgagggacacagaggccaagtgtgaagcagggttaggaaaacctctaccaaccctagagaacgtgggacctcttttaaagagtctggcagcagagtcacacatcacctgacactgaatgttatcttattgtcaatcaacagtaggaggtagactgccccccaaagagtgtggcccctattgcacatctctctgtaactgagccccaccactgcttccttggaaatgtctttgcccatactagggtttcgtcaatgtcttaggcagtgtaccctttctgaaaggtgcctgcagagctgtggctcagaccctggcaccccagagtctcatgcagaactctgtagcaaggtatcatgtcaatcaacccaggcagatatcagatctgcagttgccagtgagtccctgtacccattctgctttcctaaggaagtaggtgagactctgccatgttaaactatgcccagggaccataaaactagctaggaagaccttaggacccacactcacatcccattctaaaggtactttgttttcccaagtttagaatagtctgtggcattgagggtagagcaggggtgatggagggttcgttagagtcccccagccttcccttgcttcccttgcccatcactagtttccccttctgttctttgccccagcggtttctacaagtgctgtatctctctccatcctccacagagtcctcactacttccccagcccacctgccttctttttttcatgacctttcttagctctcctatgttggacatagttttatcctaattgctacactctgtaaataccaccgaagtcccctaggaggctgagaatgtgtactcttaaagggcagggctgttgcatgtgtgtggtttaggactgtgaacctggggaagccatatttaagcacgtcctttccctaaaagataccatgtaagctgcctccctggggatctgagtctgagatttgctggcacccgccaagctcatgagctcagggctcatggagacccccagcagctacccatagagctcagtgtaatatggcctcatctctatgcctttacgggtctgtgttccttctgactcagacctataaaaggacacagtgtgtagacagactatgtgtgacccaagatgccatggctcagcatgctatggcccatgatgccagagcccacagtaccagtaatcactggattcactaagtgggagggtggcattgaaaccaatgaagccaaatttgggaaacatccaaagatggctttgaactcaaactcttgctgccatcccacccttgtgacctgccacttaatcacatggcggaggatttgttacgagctggagaaatgtgtaaatgtttagagaggagcgagctgcaagctgtaaatggccatggcatgtttatatgagactggcagctcaaaaaggagactctaatagctttgtattttattgttatttattttttggtggatagaattaccaaactgatggatggaaggattatttgagttgttaaatatttgggatttgccaggcttttgatgtaacatcttctggcaactactttagagtaaacccagactagcttagattaactcagatctgtgggctgagaaagggaagctggggctagagacggtgggaaccttctccttacttgcaatactaccttttgagagggtaggatggaccttagttgtacctggagaacagttgatctctgctacataaattgtcaaggtttggtggtgagaaagaaagggaggaaaggcccttggtcttgcaaagattatatgccccagtactagggaatgccagggccaggaagtgggcgtgggtgggttggggagcagggcagggggtggggcggggggaggagggaagggaataggggactttcaagatagcgtttgaaatgtaaatgaagaaaatatctaataaaaattgtttttgaaaaagaaagaaagaaagtacgtagaagagagaaactagaaatactgaattagttgctgacataaacagaggcccattggtccccgtttctgtgtcctatcatcaagagtacttctcatatcttcccagtggctttccactatggtcattgtgtgtgtctccctcctccactgcaaggcttttggctgtggctccttctgtctgctgaggaggtttgttgattcatctataaatagtccagcttgaatcaacaagggtgagctcagaatggagactcttccaccaggactttttaagccaccaactgtgatctgtaggttcctcttctaaaggccatctctgtccatgagagcaatctagtgggaagacagacaccatcttgtcttttgttaagtggatggcttaaaaaaatagagaagcataaaagtgaaaagtcagatggaaggaaacacgggaagggaggagtggggtgtggacctggctaaaaaacatggcttcagccttcctcactcgtcagtaattagggctggaagcaacagcctcatacactgttaagagaattaattgtgcatgcttgtatgtctaaagctttgtgagtgttagttgtttttgaaaatcattcaaggtgacgttcagtagtatgtggaaattaatttcacattctgccttaaagttagagattcctagggcttttacaatctcaccaaagcttgtttttgagcgagctctttttacagcaggggagagggatttgcccacattcagatttggcagcaggctgggtgtcaaggcacaaaaatcaaaacattggaaacgtgactgatgcaagtatagaatgggcagcgtcagatagtgcccttagcttattgcaatgggatggcaaggtggggttcctagtcacttgagataaagcgttggaggaaattggtagattaggcaaaaaagcaagctgatgtcttatggtgcgaatacagatataaactttgagatgacattttctgtggaaatggatcttttgtgtttctacttcatgaacccagtgttaacatttattcttcaaaatctgggcattttcactcataatatgtaatgagctggaggttctttcccctagagagttctctgggtggcttggtaaatcttgttccacctgtgacattaacagggcacactgcctttccttgtcttaatctgatggtgacaccaagtcttcccacggggaattgccccatggttcctttttgctctcctgctgggcacagaggtctactgacctcacttctgttcctcactggagaaatgagctttgtgatataactatgtcagggtgacttagaactgggcagggccacggaagaagatcgcacagtcttggacacagaggagcttgacatgcaggagaaagataaaccttgacaaacagttgcgctgccatttgacaggtaaaagcaaagagaaggaagaggtcagagaaggaagggggttaggggatggggagcttggcaaagtagagggatatgaaaggactcaaggaagggcacaggcctgagaagaaaggagttctgagctcagtaaactgcctgggtagagtgtggggagcaaggagtaaaatgctttgcattgagagtacaaatgttgagttttctatcacatgtcaccttctgtgattagcctgggagaatgcaggaagtgcctgagatgacagaaagccgtgctggtccatctgtcatggtatcaggagctggaacctagaccagactgaggagcaggaaagagatggagaggttggtaacagcccagcccttttatgagtgaatgtatggatagtagtcactgaccaaacagttcaccggttcctagaaccttctgtgtgacaagttcccagccttcctctgggaaggcaaataagtgtaagcacctgacaatgtcctagggagattggcagtttggctgaggacacagagcctggtcatagaagagctgtgtaaggtatggccatgtggtactgtggccaggggtcacatattatactgagcagagctcactctggccaagaattttgaggccagaacaaacaagagggaaacgaaagtgagggagccaggacatctgactcagagtgaaaacgtagtctgtgtttttttgctgtccaaaaagcaggtggaacagtcctacactgcacttgtgagaaacttagagagcatttacgcctttgcccttatctaaattacttggagtccttaatagtttgagcctttgggggaagcagagctttaggtcgcatgcttagagaggagagatttctggagaaggaacaagcacttggatggcatcgggtagatcaaaaagcatggaggggctgtaggtaggacctggttcttggtagcacctggaagccgcgagctttactgcagtaaacacacgaagaggtaccatgggttgggtgatggagtttgtctgagtcctgctgagaccttgatttcctagtggtgtgaatcgggaccaggaaagacttgcagtaagaggcctagtcaaggttgaccagcaaaacaatggtctttgaaactgtgggaacaggtgccatggagatctggttaactatggctatttggccagttggttgtattttttctctcaggaatgccagacattttcattttaatgaagtctcctggtattttgcacgttgtcaatagtcaaaaacaatctatgagttcagagacaggcctcttatcttcttctgggatcccaacctgtggctccttatagctaatgcagtcactgaaggtccttagtgttacaaagtaaggtgcttgaggagcagtgtgaatctgggaaactggataagaagccaggaacaatggaagcagagctatgtggtgtggtagccaggagtcagatgtgctttggagagctcaccctggccaaaaacctcaaggccaggacaaacaggaaggaaaataaaggtccaggagccagggcctctggctcagtataaccagtgtaattccagtttcttttcctcagtgtcagtaaagaagagcaggcagtgctggcttgcttgtgagcagcacagggctacttaacccttaacccagatatccttatttgagtgattcattgtcttcataagtgagactgtgacgagagttctagaaagcctagaggtggggacatctgtcacaggtgctctcggaggcactctctttgcatcaggtactgtgtgtgtgtgtgttttagtcactcccttaagttgccctgtaaagcacacaatactatgactcttcttcaaggtcaaattcagagatggtcattggccagacttgggttggaacaagattctgagctgctttccagaagatcctgccaccacactgacccatgctgagttcatcttatgcatgcaaccttatataggccatcaccttcctggagaagaacaagacagagaaatcccagggcttctctgactcacccagcaacagcacacttggcttctgccaatgaggccttatctatattgagattctatgattctaaaggccttttgcgtgctgacctcccaacaagagccaggaattgggggtgcctcaggtgcagactggcagtagcagtggtatgaagagtatgttttcatcaaatgtagatgagctttgtatagtaaacaggttcatagatgtctatagaagaggccatacaatcagcctgtcttcgaggtcctggtctggatgcttcacatgtagcatttgctgtttacagcattctttgccttcctattctttctgagtgttctcaatccccatctcaaatggcccaaagcttcaaagagaagtattattgatgtagttaagtctatttttagcctgcttgtggctggtgcacatccaatgcttgaagcattaaattttatatctattttatctacatcagcaactctttacccccaaaaaatccattaaaagataacagaagcagctatcttcagacaacattcaaccggctcatattttggttgcaaatatgtcatgccccatcttgctgtagccaagacatacatttaacaattctaaggaaccacagaaagaaacaaggggaactttgatggttcgttgagataggagggggcataccctctcgactgtgcagctgtgttctgtcttagtagtgcagagaggtggaaatagaagtaaagatgccctgttcccatcaaaaggtttttggggtcacagatctttttgattagctgctccccatgtgttcatatgtgttctttctcttctctgttttttactatctctgactgtcagagagccttccaagatgatgggaggcagccaaaccatgggcttctgatgttgtttgattccttcatcaggcagaataaggaggtctgaggtacaaataatgtttgagccatcagagacagtttggcaaatctgtccaccagaattgctccatgaggctttgcaggaaggggacccctatccttgaaggatgctaatgagtacatagcattgagaagaaacaaacttggggaattaaccagattggtttaatgaataaacatgggaacagaaccacaggttcctagactctatcttttatatggagctgaacagaggttaatagctggaaaatgtaggggaaaaaaaaagcaaaaaaaaaaaaaaaaccaaacaaaaccccccaaaaacaaacaaaaaaccccacccaggctaagtgagtaaaatatttgtcacacaaatacaaggatctgagttctaatcccaagaacccatgtgaagttgtgtgtagtagcacactccaatcccatgctcctttgataggatgggaggcagagacaggagaatctccagaggctcacaggtcaagtaggctggcagtgatgaagagcaaatcgatacagctttaaacaaggtttaaccaatgcctgagcttctcctctgacatttacattcacacatgcaagcacacacaaataatacacatgcatatacaccagacacatacatatacacatgcagcatatgcacacatacatgaacaattttttaacaaatatgccccaatatatagtttacattaagagcttagtctgagaaggtcttgacttataggtctttgtctggcatatgaatttctgtattttgtagatctacccacaaatctctagtgtagattatccactctagagaaggcttcccaaaccattaagatgctaattctgaaggtacatataagtggcaagacatgtcatacttgtgtacttgaaaactcatcatactaaacacgccaattatcttaagcttctctatagatttaatataatccccatcaaaatataagtaggacttgaagaatttctttatatggatgagtgtttgactacatgcatatatatgtaccatgaggtacatgcttagtacctgaagagaccagaagaagacatcagttgccctggaattggaatttagaatggtatgatgtcacatgggtgctagaagtgaacctaggtcccttgcaagagcaacaattgctattaatgaccaagccatatccccagatccctcagtaggacttttgaagatataaacacgccaacacttaaaacattttttgaaaagcaactaaaatcacaaacatgttcttgaaaaagaatctgtttaaaggaatcagacaacctgattttaaggctcattataaaggtatagtaattatgatagtgtgagattggctgaagagtagaaacacagatcattggaacacagtagcgaactcagattctaaacccataacaaatacagccattcactatttgaagtataacaccgaccaagtggaaagggatagtatttaccaagtggtcttgaaagagttggacctccaatcagaaacaaaaacaagattcagtgtaaacttcatactttatataaaatttttttcaacctgaaccatagttgtagatataaagaacaaaaatcttcgaagaaaaccttaggtacaatgccaaaatgatggtgcatgaaagatagatgggccaacaagacttcatcaaaactgaaacattattctgtgaaggtgactcttaagagagtaaacagacaggatacgtgagaggcagtcatatgcatattacaaaggactgtatgtagaaaagctatttgcctccagttttcctgctcttggaccatactccacagtggtacatgtaccgtcctttgcttgcagtctggagtacctcttcccatccatccgcacagggaagtaagttacttcttagtcaaaagccagcatgaaagatgctctcccagtgaagctgtccttgtccctgcctgacaaccactcaaaattgtcccgttgcccactctgggaagtagtgctctctcaaaatccagtcccatagattcctttgttgctgatagttctttcttgggcaagctcttgatttatctgtcagctggtatagaacaaatggttcataaaatgggggaccttactcgaaagtcaaaggttttggactccacccacagtcctatcaactagaacactgaattgggaccccagggctgtgtttattttactttgttttatttccagatggggtctcactatatagctcaagctatgatctcaccacatagttcaggctggcctttaactcatagtgatcctcctgcctcagtctcctgagtgctggggttacaggcatgaactttcacctggcagaaatgtgcttggtatacctgtccccaacctacagaattccaatagacattagaaagataagaagcagtaatatagagaaaagaggatttgggaggaggtgagatctttctagaactgtttctaaaatctaggaaagggcctatcaagtactcactctgtgcctcttgatttcattacttccttcaggggagatagaagccctaatgtggttacctgtggctacctggccatatgcaggctgggtttccgtttctgtttgccctggctgtgaagggcaccacaactaagttgcattcaggactccagagacagggcctacctatgttagccatatgtttcaggcaacagccatattcccttcttttcccacttttgttccagatactggttttcagttttttataagaatccttgtgtattttctcaggcttagggccacagaatttagtttatgtatctcacacagccttatagatgggggtcattataacccccactttagagatgagacatgttgcttttgaggagtccaaatcaatgtcagggcctctgaacttatttcagaagatgcattccattctacacagaaaatctggtccatgtcctacctaaggatgagaatgtgaagaacagaactacagtggtattaactatgtcacaccgtcacttctgctgccaccatccctgctgtttgttccgatatcagtgtcttcaccatcccagcaccatcgcctataaccatgccatcactgtcgtgaaatcacatcaatctcctagagcgttttgcagtttatatgacatagtagagacaattagtcccggtaatgaaacagcagtgttatcagacttgtggggggcaggggctcacatctttagcccgaccaagacaggctgctctactcattcacctgtcctcaggaagtcagggaaaaccaccatatccaggtactgaaaagctggaaaaggggatttggtcaatatgtcgacattgggacagacagagattcagtgatccctgccaagccccaactttgggggtcttgaaatgaagtgaaggcttaagtagagagtaagagtcactatgcccaagcaatatccagttaaagtgtggtccttcccaccactgatccaccaccgtctcttctgtaaggtggtctaacaagctgtggatctcctctgtgaaagctttcctctttgtctggcacaggctttatactttctctcctccgcgagtgatctccctggagacagtctattttattggtgtccattgattgtctctacagtctgatagccaaagtgaggggtacaagtaccttttaaagagtgtattcatccctgccaagtcatttatagcaatagatttaaatctcatgtgcccagtacccaacgactcacaatgtacctccttgaagctaactgcagctgaataaggaggacacactaaattattcacctcaccacagtctgtctgagttgattctattctctaaacccttatttatcattctttttataattttcatacttatgtgagaccgagatagaatcttttccctacttccaaatctgtaggaagtatattaaagatacattggacgttaaggttagaccgcttagtgatccaagaagagagagggaattgagttttaaaatttgggctcagcaagattcccatgggaagttaggtgaatggcctgaaccatctgtcatagaacaagcacagggaggggacagggactcagtactcatctggaaagttcacacaccaggctggatgtataacaaagtgaatagagatagatacagtggagatcaaagaaggaaagttagttaatgtggccatctaacatgggcacaaatatacagtgaagggacagtgtctattgggcaacctgcagtaagccatgctgttaccactccaaaagtcctctttccctgagcggaaggagaatcttcagctttagaacatctgggcttcagttctgctgaagttgtcacctaccttgtagtgactgaacaagtcaataaaaccatctctgggcaattgctggaaggttttctggggtgcttcaagttagagagatgccattgcctaccttaaaatggtttgggacagtcacaggtgtccacattcctcaggttaagagctggaccctgaggttgagtcctcgctaccatttggcccagttatctctgccttcagcttctttgggtcaccttagttgttccctctctgcagatggctcttgcccctcacttttcttagcaatctctctctaacagtgctctcttacctgcagaaagccccagtcaatccttcattaaaacgacacagaaaataaaagccctttgtttccttttcttccccaagcaggttagatttgtggtggctccatgggaggaggagaaagctctgaaagcaggtttacgttctagtccagctcctggtgactatatagcccaagtgatttcagcaactgctaccaagtaaaaaccccattttagcagaggcaggtaaacaggccatttcagccttttggtctacccaatccactctgctgggtatagggagaatgccatgcaggagaccaacatagtgaagtcttgttcctcccttcaggctgggtttaggctatagcaagttgcaatgagtttgagcttctaattgaggttttgctactcactgattgtatgactgaggaaggttaacatggcttcctggaatcaggattcactcattaaaaacaatcatcatattgagaaccagaagatagcttagttgctaatacaaatacaaggaacatctagaagaagaagaagaagaagaagaagaagaagaagaaggagaaggagaaggagaaggagaaggagaaggagaaggagaaggagaaggagaaggagaaggagaaggagaaggagaaggagaaggagaaggagaaggagaaggagaaggagaaggagaaggagaaggagaaggagaaggagaagaagaagaagaagaagaagaagaagaagaagaagaagaagaagaagaagaagaagaagaagaaggaaagaaagaaagaaagaaagaaagaaagaaattcacgtgcactggcagatacttgcaaccccagactttagaaagcatagataagtggaaccttagagctttgtggctagccatcctaaggtgattagtgtgtcctaagccaatggacttaatgagccctgtctcaaaaaaaaaaaaaaaaaaaaaaaaaaaaccaaacaggtgggtggatagtactaaagtctgccttctggctgccacattcacatgcacacaagggtacatttgtacacaaatatgcgcacacacattgtggtggtttgataagaatggctcctataggctttgaatacttggttcccatttgataaaattgtttatgaaaggctgagaggtatgaacttgttggaggacatgtgtcactggagtagactttgaggtttcaaaagcctcctccattccacgttctctctgcttcttgctgtggatcaagatataagctctcagctactgctttagcaccatacctgcctgcttgcttctatgcttctcaccacgatggtcatggaactcacctgaaactactataaagtaccaaatagactcttctgtaagttgcttgatcatggtgtcttattacagcaatagaacagtaactaagacacttggacttgcacacaaaacggtcatgttactaagtactgattctagcatcaagctcaccagacagtagcttctttatttgtggtttggggaaaccttgaaaattggcctttgaagtctaactgactgaatgaaggcgggcattagaagttaaactcttttgtgtttctagacgagatagttggggatctgtggaactcaatgcattgttataaactggtggatggaataagatcttgttcctgacctcacagaaccaaaaagcatgggaataggagtctttttaaatgaatgggaaactaagaaaggataggggtgacttgccttagggtgtggtcaggaaagtctgtcttaggaagcaactttgagctgagatcaatgggaaatgggcagtgcagaaacagggaaagagtgagagtctagctcctatgtgaggagagctgcacaggtttcagtgagcaaaactaaggcaaggaagactgtatcaagatacagccagtagcctggtgggctagaggaagcaatttgcagttttgtatggccagcatggaaactcatgaggggttttaaggaaggtggtaatagagtaattttgtttattaagacctgatggagttgacttgaagaaagattacttagaatacaaatgccatgttcacagggaaagcttatgcactctcccaagggccagcatgaggcagcaagggctgttagtgtctttggctctccctggctccaggttctgtggtagaggtgggacagcttgttgatgttaagagtctctgaggcttggagactctggtcttctgaagctctgtactctttcttctgcctttgtgactgagaattccagggagtagatatttcaacaatggctgctgtgtcagaattccagattgatgacttctttgcacaattggtcggaagatcaaggaaccggaagtgccaggcaggttaatggagagggctgaggaagctgaccttgtcacttgcagaaaaagactttttaagaaaataggctatttttgcctctcactgaaaataaggttttgtgttgtttatctcaaggtctgagggcgatggtgttcttgggaatttgtccccattgagaggttgtttaagtttggtaagcatcccatctcttctgcactggcaggtagattgtgagcattaaaagggctgagtgtgcccccttgctacttcagcttgctgagtacaatggtttggcctgtagggcaatggaggctatttctcttcatactgccccctttgtaggtgagcagctggtttccggagagcaagaggtccattttaccattgcatgcctttttatgagctaaccattggacaggatccttgggtaagcttgcacagacaaaatggatttaaatatataaataaaatgaccaagacatcctccaagtcttgtttcatgggctacacagccaggtcagagacagctctgtagaacttcctacacttattgattaagagcctgctcttttccaggcattaattacactatcatcccatgtttcccaatagtgctctcttacacagatgaggcaactgaggctcacagtggtgacacctggtgcccaaaggaatgaacatgcagacagaaaataaacccaagatttgattgcaagtattcccatcccattgttccttgtttaagtccatccctgcttccttagtgtgtgtggacatggggtagtgtaagtgactcattctcccccagtatatgtctttaatcttgagggtgctgtgggaaagtcacagttggcttctggcccgtcaggacctatcttctctttcatggtgctgtgtcagtatagccttcccttccccagcttgctaggaactgagtgaaataatggagacaaagggccttcagggagtagagtgtgctgcagtagtggcttaggtgctaatgggtagcctctattgctggcagtccgctgagggagacactgaacctgggtcagctacaaatgggcacagctccaaggcaacagagaaatgggccatggtttgcctggtcagaaattttgtcacctgcctaagctgcatctctggctcttgcttgcagggttgagtaggtacctgggtacactgctgccagcttacctgtggttgttcatgctagtatgttacccctgcttcttaaagttcagcatcagcctaggctatactttggccttaataaacagttacatggagatacatagggatggtggggctcccatgtccacctggatcagatactcttaacaagatccaggtacattcatgctcctcctctctgaagccatggctgtgggagtgggaggcagcagtagagttagccaggagcatctttcttattgcttttgtacttgtagatctttagctctcttgctccatctacccttaatagcagcaaatccaggagcagccttattattggaagaccaacagaactccaggcaagtggcacaatagccttctagcaaagaaggactcataggggaacacagccttgactggggactcttctagttctagaccatgctaagatggacattctcattcttgcctactatggcaggaggactagaattcagagttgggaagatgagcttggcgtgagctatgttcgatgatgctgaggagaagaatgaaggtgatgctaatagtagttaaaataggcaacagtttccactcacctgttctccccagcagaaacttagatatcattgcatacaattcagtcagtttcccttactaacaagtgttagcatcacaaaagagatgggaacacaaatgctgacagaggttaaatgttctgcccagggtcaaatagctataaggatagtgacttaaagcttgacctctcatcctgatgattccaaagtcagctctgtgtggcaaagcacctttcttataacttgggagcccagggtccttctttcagatgctccaagcatcattcaagttctgtcatgagggtgaaagacccagatctttgactgggccaagaccctcgttcctcaacccctcctgtggcttgcagaaattctggatgctgctttgtttttgttttgttttgttttccagatttttttgttaatttccaggctatgctagaatcaaaatggtggtactcaatttcttactgtgttttcctctggccatacatgaaatacacattgtgccttagttagggttctactgctgtgaacagacaccatagccaaagcaacgcttataaagataacatttaattggggctggcttatccattatcatcactgtgggagtatggtgcgtccaggcaggcatgatgcaggaggagctgagagttctacatcttcatatgaaggctgctagcagaacactgacttccaggcagctaggatgaggttcctaaagcccacacccacagtgacacacctactccaacaagtccacaccttctaatagtgccactccttgggtcaagcacatgcaaatcatcacacatgggggaactgagcctcatgtgaggatgattgaaaactttttggattgggtgaaagatgcttgaattcctagctgctccaagtgtccctccctacactcaaggcaacataagactctgctaaatgtggctgtctctgcttcttggagagttcatgggccaaagcaaaagtgacttcgctagcttggctgtagcggaagaggttgggaaaccacactgctaacctttgcatctgggcccaaaggaggaacagtactgagtactacctgtaaataatggctcccagaatcccccaggctccttctttctgcaaggtcctctggtcatcattacttctccaaagctgctaccattttagcacaggcttttttcccagatcatttatcccattgcatcctatctactggttcatctttcttctccaagacaacaacaggcttttctctaagcctggggtagccgcctcttttttctatgttgagtcagttccaaaaaatagtgcaaacatcaggggcataattcaggatacataatgaaacggttctcttgtgtactttcatcagattattaccgtccttgtagttgatatctaattattcttgtcatttcactctaagtcgttgtgtctctttttttatgtctttgcctctcagcccctttagttgccttgcaattgttctgttcattcatcagctgtccaccaagcacctacaaggtacctgtgaggcactctgtagataggagctccatgtatatgtatgatctaatcaggacacacgggattagagatgactcaggatgatgacacttcctaaactggctcaccttcatctcaggctgatatccctcatggaagggggattaattgtaggccaactgaacagttatgtgaagtggggatggggctctcatttctagacatacctcaagcatctcttgaatgaatagctcattcactgttgaatgaggccacccagatacacacgcactcattcctggagtcaccttctaattctaaggtttcataatgagagcatgctttcttcaggggagcaggtgtctggtagacttggactcctacgctgttcttccgattatttccggagatcggcacctctccactctggcttggctgcacttgtttctgtcacccccacagggctgtgttgtttgttcctggagcagagagacatctgtcatccttactgagccttgacagatgccacattcaaagaaccagcactggtttgaacacagaaagcagcggctgtgctgtcattgccaggatggctcagtataactattcccactgcctcctccccaggcacaacctttcttaccagctcttgcagaagcaacctttctgtgctgaggtgttctgaagacttgaactaaaagaataccaagctttgagaagcaaaggtgaggcaagcaatgggattacaggctatgataccttttgggtgacatgtacccatacctctgtgggctaggagaaggctagaacactgatcccaagcacagtggggaagacctggcaggcaggacaaaacctcctcatgggtgtgaacaagtctccttttgtctattctcgaaagtgcagccaggcagtggtggcacacacctttaatcccagccttaggaggtagaggcaagcagatttctgagttcgaggccagcctggtctacaaagtgagtttcagcacatccagggccacacagagaaaccctgtctcaaaaaaaacaacaataaataaataaataaataaataaataaataaataaataaaaacagaaaaaagaaaatgcctcatttgacccttgccatctccgagaaccagaacttgggtaaatagtatgtacatacacagaatacatggatggcattgagtattaaagactcccgctattacataagatggatggcctgaggttacttcaaaggcaaaacttggagcaatgaagataagaatatatgtgtcagggtcagaagataaaggagaaccagagataaagtcctttaatccagtagggaaatctttgaaataatttatatgatgcattatgttccttcttttggatgtcatcttattttgaccatttattaccaattctctatgaatcccagccgacaagcccgagagtgttcatggacttgctttgaagaaggctgggttgagagtagtcctgtttggcatgctctggacagactgtagccaggaaatgatgctggagccagatctgtaagccaatgagggaaaggggattatatgttttgtgtaggcaaagctgtcaggggctgagatttctcctagctccttctgattcttccatgcctctgtcactggtgtccctgggatttccagcctgcctcaccttgttttcttttgctttagagcctcttttttcttttagaagctgacatttgcattctcccagtgttctctttgcatttctccagatcatactgtgagtcatccttctctggttcttttaggccaggaagggactctgtactcatcagtgcaactgagagcagtcgtcataagagtgacagtctctggaatctacaaaacatcaatttgaataaaggaaacaagacttttaagaaagaccagcctttcccttaatttaaattactacatctcaggggaacgttaatttttaaagtagctcacatattccaaaatagcagagaatcctgctagacaaacaatgaagtttgctttaaaaacatgcctttattcagctagcaaggaagcaggggaaaacaagagatgagaagtgatgaatggaatatccatgagtggattttgacactaaggctaacttcatcatccctgtttctcagtgtgtcctatctaagcagagccagacagacacctctgactcttagccttaactctgacatccctttcttgagcgcactaacagaagaaatctccacgtctgtgagtgtcaggttcaaaaccgagacatgttaaccacaagagagacttatctgagtgagcttcatatgagaattctgccggcatctgatagaatgaagtgatagggttgaagctgcttaagttaagaacttgaagggaaggtgatggatcaaagagtggatgtagggaagttgtaaatctattcttcccatcctgatgagcggtgatttccatctatgaaataatctgacaatggaccgataatgggaaaagcaggcacacattttattatatacctaaggcatgggaatataaaacatgaagatgggcaagttggctgaaggtaaagaggtggggtgggatttggacttagaattctggaggaaagagcaggctttggaaacttgccaaatggctgtcagcaaacaagaattgtcttgtgaatggagatgacttgaccaacgcctgtagcatctgtcgatgtaattggttccttccaacctctcttttatgactcacctctgctttctcctgtgttagtctaatgttcactggctctttgcttgtgaggtgccataatagaacagcatatccatttctttcttgatgggaaaagccttggtgagaaaacagctctcttttctatacagctgctttagccaagtcttagaactgacattcattggttcaggtcaacgggcattcgtattttagggtcaatggagatggcttcaggatgatagatcttgtggtctgcctgggattagcaagcctggactggtacactcagggcagaggtgggaacattcctgaactagagggataaagaacaaagaataaggtcaagttttgtttctagaagcagcaattgatgcctatcactaaagttaagcatctactctgttatagtttggtcacaggaatctgaggagccagccccgatgtgacccacatttacattaacatttttttttgtctatttcccttcctgtaatacatgtattggcaggcttcttttgccatcctgttgctaatgttgaaagggcctccagagcccaatttgacaacatggatttgatcctatgatcaaggcaaagacaagttttaagcccacaccaatttctttcccaaccatagatttaagagattatgtgtgtcttctaggctaaatggtaatttgggggctgtcatcactgagctggcagctttggtaagagttttaaatctattgtcttatcaacttaattttattttttcattaaacaaatttcaatgaaattcctataactgtttattgccatatgcttgctagtgccccaggcagctgattgactactacatgtaaagccatgtcttaataagagtccactcatgcctattttgtaggagtggcatatggctgtctaaattcatgccaagcagagccttcagcatccatgttctatgtgtggtttgatgtatgtggatatgaaaaagatatgttctctactcctgagctatgtgtgcttgcaaatgagtaatgcatttcagtgggaatgaagcagaaggaagtgattaattttgccccaagtctagtgtgggaaactgaaaaggacatctgagctgggccttgataggtgagtaggggtttcccttgtggatacggtgtgggaagagcccgttctttaacggagaagggcatgagtcttgtctgagatagagctgttaggtttaaggacatgtgcgatcactcttaccttgtctcttcactcctcagctggatggccccaaggactcacatttgtgttggctcaggtgctttctttctcaaagaatagaaacctaacaagctggctgcaatgggaaaaggatttaccatcttatctaatggagaggcatagacttgaacagacttagggactgcttgctctgttggctagataggatcttctcggggtctgatttctttcctttttattgtctgctctaaaactatgatgtcttcatcacatagtggagttttggggtggaggtggggctcagacgttgtggaggtcacacacttctgttgtatactttcattataatgcccagcaggaaagatgtccatttttatcctagcaaccccagcccaagtggctcgggtcatgtgaccacccctgaaccaaacaatccttattcccataggctagagatcattgagagactcggttgtccttgctctgccaggatccttacatggaatctggggtattagcagcatgaagaagggagtggtaggtcctgagacgacatccagactgagaggaaggcattaaagaaatgttcaccaaggtctatgtttacacccatgcagtctcaccttcccgggaagtcaaggaggtgggtgtcactgacttctgatcgtaatgctcaatctgtactttacctgctggttttcaccatggcaagcccacctttgtcactctccatggtctcttgctttgcccaggaacatcccttctctgttgatttgtgataaagtttgtagcataatggcatgaggaacacagaatgatctgaaatgttgtggcaatgactgtccttggactcattcagatgtaccttcaaagaagacaggtgatttgatacttataaggccaccaccacccccctctctgtagcagggtagctaaattcattttcagtcataggatggcaaaaaaaaaaaaaaggaaatgttttccaaaatgccttcgcaaaatgccttccattgataatgagaaaagtgtctgaggctgttagctattgtgacaagttatgtatgaaatacaattgagatatgttagccaagaaaaggcaagtgattggaggtagctatcagcctggcatcatcacttattaagaaacagtaatgtctcatggggagaaagaacccttgcatgctggctgttctgttggtaatctaggccttgatgcaggccccactctaccatggagcaaggctgaatcattcattcaacatgtgccgtccctcttgtccttccccttagctaggtgggtagaggatggcagctacttttgtccttagttgtttcatcagtggatggtggaatcagacactgtccacatcataaggttgtgaaaactggatgggcccatcctcattctaccagctggcaaatatgtattagttatgttactgttgttgtgttagaacaccacaatgaagacaatttatagaagaaacagtgtgttttggcttctgatgccaaagggttaaagtccataatggtggggacagcatggcagcaagtggcaggatttgtgacgtgcctagaaagctgagagctgacttctccaacctgaagcgtgaagctgatagaaaactagaaatggcatgaggcttttaatctcatatccctcctccagtgaggcatacttcttccaacaaggccacatctcctaaagtttcctgaacagcacctccaaccggagtccaagtgtttacatacctgagactgtagaggacacttctcattcagactgccacaatatatgtataatgtctaactacaaataattgtattttgattagatatataatgatataggtaactgcacacacacacacacattcctattctcctgcataatatgtagaaaatatttgcatttctatttactaagctcagtaagtatggataaacagataacaccatggagtgttgccaagaacctaagagtcattgcatatagattatctagcatataacagactcttgataaatgccagccattataataattattatgttgattgaactgcttaataataatgggattcatctgaacagagcggtatatgcttctgtagtgcttggtgccagcactgtccccttggtccttaaaattgcttaatgacaagggtcctttcctgttctgtggatctcagagaaaggctttatgctctttctctgtgttttatgtccaggggtaaattgcaggatgaggatacatgcagtggtaaagtgtttcccagttcagggtttctgttgcctattctggaggcttcccagctatttgtcacagtctcatttgaaatgcatgtggttttcatccataatatcttgattgtcccattaatctcctttaagcttcatgaaaaatatagagggctggatcccaaatagtcaccaagttgtaattttgcattcaagggagtgtttgccacagacgtgaagagactgatgtccccgtttggcaattggctttccaatgatgtcagaagggctgttgcattctgaattaacaacctgttggcagggctgcagctctattttgcttctaatatgtctctatctttggctgattctttatctccaagttctttctcttcttcccagtggatgctctgtactagtacctagaggggtgttcaggaatagcttttgctagagcagcaagaagcttggtacatcattttcccccatattcatagctatatgcagtgctcacccagaaagaacaggctttgttagatcaaggagcacacatcagactttaaggttctgagctttaggcttagtttactttttaatatagcgatgttaaaaacatgtgacatgttatttgtattttagtaaaataacatgttaggggtagggtgcatatctcagcctgtaaagtgattggtaggtaagcatgaaaacctgaatttgatcgccagaactaattgtaaaaaagaaaaccaatgccttgtgatctgtagttatagctcaggtctcaggaggtggagaaaggcagatcctcagggctcactggccaacccgcccagcgtaatgagttagctccagaattatgagagaccttgtatcaaaaactaacaactaagcaagcaagcaagcaagcaagcaaaggaacaaacataaaaaccaatgtggacagttcttgaagaatgacactagagatacatgtgtccatgctcctgtaacacatgtgcccacacacatgaggaacacacacacacacacacacacacacacacacacacacacacacacaccgagttaaaagttctagtccttatttgcactacttattttcactagctacgtgtgattgcctttgtgggaaacatttccattaatggagaatggtggtcaagccaggaatcagttggaaagcatccacagtgtatgattcatagtatcacagaccaccaagagccttttttaaactttttctgctgtgtttcccctcccatcatcaatccacctttagaccaggagaaatagcttctttcctgatctatcatcaacattcaatgaaaagatgaaaaagtcatcatagagaatgtcaatgagtaattttcttcctaatatgcacaccacccattgagagcacaatgcatgttttccctcattgttgactgtcttgggtgaagtgagaaagtctggatggaagaattttatactagaatctagtgcctgagaagtcagcacctgtcaaacactttgaagtaatcctacccaacctgaatttaacattttctgcctgtggaccactctggtggacaaatccactatacataacttggtctagtcattcagctccaaaaaaaaaaaaaacaaaaaaaaaacaaaaaaaaaacaaaaacaaaaaaaaaaccaaaaaaaaaaaaaaaaacaaaacacacacacacacacacacacacacacacaaaacacagagtagacattattggaagaatagacttgttttggatagccgggggctattgtttgctattgtttcattgttaaatgtcaatagattactcagtgataatagatccgaggagatgaacatggctgcatgaatattgcaagaggcctgtgtctctcttggggaccctctagacctatttttgaaagtgactcattaagtctttttgcagagttgagttcacattctcagacaaggtttcttaattttcttagttttggaagagaggaaacacaggaatggcactggctgaaacacaggaatggcactggctggctggatagactgatgaaaagagggaagcatcctacctgcctggagagctctgagatcagaggactgagcctgggtcatggaagggatgatgtgtttgcacgacagtgctcagaactgctaacaagtaccaggggacatggtgttctgcattatctatggctggcttaccagcaggctggagtctggcagagtgtctagattcttccaaaggctagagtctcagaacaagaagataatttcccccaaacattatggtagttgagtgtactaaggcctcctaagaatcacaacttgctatagggtcatgttggttttgtgtcctttggcttttcctcatctctatgtgagttgatctcatgaaaatgagttgtttttttttttttttcccctagcatcaccaccaagaaaactctcaatgtatctcaggagtaaatgtaaccatgacttacattttttttttttacaaccacttgaataaaatcttccagaagcctcttcttggtggtttctggagttattttcagtcattcagaatcttggttcacgtgacatgttaactagatagatagagcagggacagctaagaagctgtggttgaagggagggagggtgaagcccagcctgctggactaatgtcccacccccacaggccgcccccatcagctgagtcagcccttgagtcaccaatgagcaatcccttcatccccagagcgtcatcacactgagtcctgacaatcgtcaggtatgactctgagagcctcacagtgactctgtgagcatgctaatgaggctatctgtccctggcatgaaggagacagacgaggaggagagaatagcgccagtgctgttgaatccagttcaagaaaatgctgtaatgacaggaatgcagggaaagggacttgtggaagatcaccaacgcaggagggtttggaatcttgagtagggtcatttcaagactcgtaatatactcgttagctcagagtatatttcttttgtatatgtgtatgtgccaatgtgtgtacaccttcatgtgtgtatgggacaaaggacaacctcagctcatactcctcagatgctgtccaacttatttttgagaaagagtctctgactcatctgtcattttccatgtaggcaagaaagtaagttctagggatctgcctgtctctgtatccctagagttgagattagtactgcaagctactatgcccagcttcaaacaaacaagcaaacagaacaaaaacatgtgtattctggagtaattgaactgaggtccccatgcctgcaaggcaagagcttcgctgtgtgatctatctctaccaccctggtgcattaatagaaactgacttgacttctgggtaggtttctggggggttaaaattagaattagcaagcactgactgctagatgggctctcttgagcatatgtgagcttccttcttggactgtgtgctaaaggtgtgcgtgagagtttccagcctatcctaaatgctcttgcttagcttcaagtacctctccgtccctatccagcccagcttcaaggcttaaggtccatctaatcattcaaccactctcaccatgactagaggtatcagctgcaggcatcatagagcagatgcatttgtttctttgacaaagatgaatagttgtcttttgcagcctcattcattcttgtgtctattacatgttttattctgggtgcctttgttttcaggcctgagtgatgggcagatacaatgtatgactcacttgaaaattaaacctcctaaaaattagcagtagccaattttcccagatgttgatcttaggccctgcaagttgaaaagactaccttctcatctcagagatggtggctgctgtgctccattgtggccttaatctgaactgaaaccagggaaccaaagctgagtcttccttgtaaccttggctaaaaatttctctattgttccctaatgtgaaagaactgtggatcatattcttatggggaaaaaggacgaggagaaaagggactatttcattttctagccctagctttcctgtgaactcacctacaggtttgaatgcaacatgctggctcccagcatatttaggtataccataagaatggtccttacatcatcctatgcccacatgggtagataaggagtgttggttcaatgtgactgctgatacgagataccacaggctgggcaacttatgaacaagagaaacttattccagatctgaaggtgctgggagtccaaggtcaaggttctggaagcttccatttctggtaaggcctttatttctgattcttagatgataacttattttgtcagggtgaaggagggcaaagtaggcctttagagccccatctcattcacagggactctgtacctttggccccattgcttctacaaaaccttgtctcctaatgcagtcacatgggtgatgagatgctagtatctaagctggaggcacaccattcagaccatagatgagagcatctcaggactgcattaggaagtgattgcagagtgaaggagctcattttctaaggccaataccatcttaatgttttgaaaagatttccggttttagtatttagcttcaataaatttagcctcagattttagatttgctgagaggcaaggaaagtatgggcaagtattgtctagaatcctaccgctgttttgaatacagccagcattgcagagatgtgctccaaagaatagtggcagcccatccacagaacagaatgctaacttgtctatctgtggccattcctgggagtacttgggaagtttgataactgatggatttggccctggtttgtcagatccctactggaatattcagtatgttcttctgtatactcatctgctaagggtatcagaactacatttcaggagcatgctggcgtaagagatatgaaagcgtcatttctcacaggcgagtacccatcgtcccaactagatgctatacttgcattcaaaggcctattaacctggctcttacccagcttgccagatctgtgtcagcctgagtttcctggccctctgcctttccaggacctcttggaattctgtttagcatgtggccagcagacaggcacacttgtattggtctggcccatagacagaaggcaatggctacgtattcctcctgtttctcttgtcttacctgtgtttagtacttctaagaagtgatgacaggtgtttctgtatagagtaaagggacatgctatttctaaaatcatactgaagggtatgctgctcccctcaaagtacatagaaggctacaaaccacatccttgtgattttttttccatttgcattcatgttttgaaggtcccacaagttccagaggtttgtttgtttcctgtttgttccagtggttcctagtaaaactgcaaggtatgtgcagacatgtgcctacctgggctgatctgtaaacaagcctgtaagttttcaggatcttgtggccttgcacaagtaacccagtcatcacatgtctcggcttcttcatctctaaaaggggccactaaaatgcatctatattatatcatcatgaggaaagatgttttaatcatactcggtggtgtagtttcggaactgaaataacttctctgtgcgctggctggttttgatagcagtatcaccgggtatcatttgttgaaagctcttagcagcctgccaggcatgtttactgacttcccctcaagaagtggacgaaggttcccaaagcagcatggttcactcagtctctcaatagtgttacattactgttccaactcctcaatttccagaggtgggaggggaggcatacctgagcagcagaggcaacagctggactcacacatcatcacatttagaactcagccccaggatgctggctcagagcccaaggtcctgaatcttctttgcagagctgtcagtgaagcagctcctgacactgggacccaaagactgaatcctaaccgcagctctggtaggaggttcctccaacattctttctcctactgtaggtcagggaggcctgagttcaaatcccaatctacttccctagcttcccaatcctgtgcctttgtacagatcattatctcttctgaacttcagtttgttgtgaaatatgagcaacaatatccatttactgtagcccctggccagataatgctgcaatatattccaggttcaagtaaaaggcctcacatttatttagtgcatggcaagtgtcagaaacaacgacagtttgttacgtttatctgggggtagtttccatctacgatctcatgtgatccttacaccagcaccagatgggcactcttgatttttcagagggagaaataggctctgtgagaataagtggctcattcaaggtcagaaagcctacaatgtggttgtggcattgagactcaaaccctggcaggggtgacctatagaaatacctttgtgtattactcctctttacagttccatgctaaggtccttgtagtatgcatacatcaccactttccatgagcagcagcgcccttgtgatggacattttcatcatatctatgccgggtgatgctttcatttgagcctgaggctaaccttcctcttccaagagaatacagcacacatctagttctggattttttaggggtgttaactctgtcacagatggtttcccatgtctttggacacagttggctgggtctgttcctctatttaacagtcaaggtgattagaagagacatttttgcaagagactgtaaggaggcatcccaccattctccagttgagtggagggttcccatccgattgcaggagagatgagtgtagcaggatacaagcaaacctcatctgaattctccagagaattctagttaaccattaccaaatgagatgcccttcagactgggggacaagaacacaacaaatgaccggaagtacagctgcaaggcactttaataagaagggagggaaggagagtccaagattagtaaccaacatgcttctctcatctaaattgactttcagagtgaagggtaagagctgagggggaattgatttggatgtgctaagtagccggcatggttttgtttcacggtggtgcaagcacacttgactcttgcatgactgctctggaagttgctcagtggagcagcatcacctggagctgccctgagtctgtgaagtaacagattcaataagaaaagctggttagcactctactgttctacagcttccactgtttttcctttgcacccccactttgcctttcttgccccagtgtcatagaaaacatccctgccctgggagattgtagcgtacatctgatgtcggcagtccaggaacgtgcccagtgggtccacaggtgtgtctgtgtatggagtcagatgtcaccaggaagtcatggaggaggaggtggttgaaaaagtagaaccaagtaggggatggggataccttatccattcactgggaattatttactgaatgctgactgtgtggcacatgttgtttaagctgtgaatatagagctgccttcagtgagtccaagtcagagcaatgacagttgggaacagagcattgcagagcagggtatttaagtaccaatgacctgcgatgatatctcacttaacacccccttggcttatctccattctactggccaagtagaaagaagactttgttctttgcctctcttccattctatgacctatcatcggttctttgggaaatttggtttgcctttgtctgttgggctgaggggtagacactggcatgaagcctctgattcatgttgttactgggattcagtttcttggtggaaagaagctaagccagatgacctagacccactaagtcagaaactcctccttcagagtcttcggtttggcctttctcatgaagattctaatgcatagtttgaagtcatggaggcagagttggaaagtgatgtatggctctgagtgctcacctttcaacaggtcctactgtgggcatggctgatgggatagggtgcggtcctattgtaaaagtttggggtcatgtcctaaatccccagaagcaaaacaagaacccacaaacatccattgtcactcatcaatttcctcagtcaacacttacttcctaaatacagaagtcagaacagtaggattctagaatcaggttatctggtttcaaatcctgccagtgttatttactatctgtgcatctttgagcaaggtccttaattagactctgcacttcggtttcctcatatgtaaagtggaaatattagctgccataaagggaggttgctgtgaggactcatgcagattgggaggcacgtgagctgactttcagtgtcttttgcccactgactcctttacgtcatcagttcattggctgccattggtctggtgtggggctgggagtgaggggtggtatgttggtactttgtgtttactcatccaatgttctcagtacaagagccaggtctccccaaagcatatgaatcagtatgtaaagttaagtcaataacaagtgctttgacagtgacaaaggatggtaggaaataagtgactgtgggtgaggaccagtactctgtagagaggatgaagggagggggcagttctgttggaaaatgagaaatgaacaagtcattggaatttaccaatgtacagtggaaaaaggaagaaagagaggaagaggaagaggaagaggaggagaaggaaggcagggtggtcagagagagagagagagagacagagacccagtcagggagagaccgactccttggatttccaggaaagagatgagcagttaaataaaaattgatcctgaggccaaataaacttcaagataattgcttctactggtagtgaatcattatgtctcacaaatgaattcatctttgtaagttttcaggaccaaatgtccttgatatatttattaatcctcttcacttctcttccttcacctgatccgctcacctctgaattgaattgaaattaagggtcattagtttggaagagttccctgttagtaggtggctgactttctactcagcctggctcggttcctctcctaggaaaggaaagttcaccgtctctgctgtctccattattgtgccttttggatttgtgctcaaagcagtgaggctcacagaatgatccagttttcctgaatatgtcccatttccaacctttagacaggatgtgggaaccccagagacatgcatcagtctgagatgatgatgggatctctgtgtagggtgctctggtgtttagattgtacaaggtagcagagcttccttcctttgtatctttaaggatcttgattctgacctcatcactctcttctcctataggtctctctctctctctctctctctctctctctctatatatatatatatatatatatatatatataatcagaagtctttgaacgaaaaaatttagtcttaaccaggtttgctcctgaacagttttcaaattatttttccacttttaaaaataactttcatacccttttcctgccatggtgcctcttgcttcagttttgttttctggaacatatttgcaattttttgaaaatgtctttttggtagctttatgcatgatctatgttccacccagtatcctcagtttctagaacagtatctggcaagaaagatattgaggaaaataggaaaagaaagtgattggggctgggaccatagctcagatggcagagtgcttgcctaccatgaatacagccctagattcagtcctcaaaagcacataagctgggcaaggtggcacaagcctgaaatccttacactaagaggtagagtcaggaggatcaggagctcaaagccatcttcagctacataggaagtgtttgaataatcagggctttccaagaccttgttacactgccccccttgccccctccccatactacacacacacacacacacacacacacacacacacacacacacacacaaacagaagcacataggggatgaatgccattggctagcaagacacttggctcctcccattccttcctccatgctccaaggtacagttgtgtcatctcatctaggcaggataattggaaggactacttaagaagatgaactgtaaaatcaggttcaaatagaacttactacctgtgtgacctcagaaaaataaatctctttacattttataattctcagtaaggtgcctagtttatgataagagtgcagtatcgccaggtgtggtggctcacgcctttaattccagcactcgggaggcagaggcaggcagatttctgagttcgaggccagcctggtctacaaagtgagttccaggacagccagggctatacagagaaactctgtctcaaaaaccaaaaaaacaaaacaaaacaaaacaaaataaaacaaaacaaagagagtgcagttactaacttctgagaaagaaagcctatcccttgtttgggtcatccatgacctcaggatctggacttactactcagctaaagtagcctggggattatatggaatataccaggctttgtatgtagggtcaggaatcataaagcactgagcctagaggagaggccgtaaagacagtggccaggctatgtggaaacaaggtctttctttgaggtacaagttttccgaggcctgaggaggccctgtccctcaggcttctgtccttcccatagccttttggcaagattttcataagtgtattaaaaaccaagatgggctgaccagatgagtgacacttgccagtgatggggcattgctgtgctcctccaagcacggagaactcgttcaattatgttccacccctgtgatggtgcaatcacaggcacacacattaacttctgattatagccttgttgttgagtctcttttgacaggagggaaatgaatttacctcatgtcacctctgtagtttgcaagcagccttggcctctgataagagcagcttttatggtttatttatttattttttttaatttttttttcctgagaaaaaacattcgggtggtggcatacacatcgaggcctggaggtgaacttgaactgactcttcatagtgatagcagcctgtacaggctcaaagaaaatgaccagtggtgttgagctgaccctgaaagggcaaaggccatgactgctatgcagaagagagtcctggggttacacacttcccatcttagatcataacagtactagattgtgcatcccttggcccttctacccattcatagaacaggagtactactaatagttaccctacaggcacagaagaattagtgagctattatatgcaaaatacttagcacagcgactagaatactaattgctatgtattttgataattagtaaaattttttctgacaacaatgttactgttttgaggaaagggggagacaccagagttcaatagtatcttctccatttaatagctgtgtgacattgaacatatcccatcatccctgtggactttttgtgacgtgagaggagagaggactaaagcttagggtacctgtgaggatctcagtgacacagcccactgagtgttcagggaagcttggtccacaaagaggttgcttgattattagccattttcttttattgggatgctgcctctctcgtatggcaggaacttagagaggggaggagtatccatgatttgagtctcggccttgaggtaaaagccttgctttccatctggacagcaggcaagatggataccttctaaacacaacacaatggcatttggtaaagtaccctggaaaaggctaggaggtaggtaggtcctgggcatcctgcaacttttacctgtgcatttagcacttgctatgagtcctgttgggaagggccacagctgtaagagaccagtagatctctttctgacttcctcctttccactaggacctcctctctccaccacaggatgtgaccttgccctctctggtccccattactgtcatgccagacctgtgcaggtctgggcacatctgagtcttgacatttcactcaggcagggctttcttagagtcgacaggattctgtgatgcctctctggaaactaagccaatagtctctacagagaaaatggtaaagcataggacttgctacttgtctaatgctgttttatttttaaagtcaacttattccctgcccatagttaattctcagtggcagtacgagtggcagtatgctaagaccctcagcacagagggacagtgaggtgctgaaaggccctggcactttgatctgatttcagatttagaggctgagtcaggcacaagctccaggacctgtctgccctttggaaaccttcaagggcatgacatattttggaagaatgtcccacactcactgtgagtaccttgagggttgaagttaaaggttgaagtggcctctgactcacagccatagaacctagtggctatagcaagagcccttgtttccaaagagggcagggcctgctgtttctggggatttggtactgtgctctaagggaattgctttgtgcctccacaatgagtctcaatagggatgaggcaggatggtgaaaggggcagacagaagcacacatgagagataaaaaacagaaagggagaagagaagagctagagaggtcagggaactggaaagcttttaggaaaacaaacaaacaaacgggaaatagaaaaggcaaactcaagacacagatttgtaaagggaaattaaagagccatcatgaccactaataagtacaaaggctggaggatgacattgatttcgtcatcaaccctggacttgtcattaatgtttgcaatactcctatggcgaaagtattacggtcaacttcacgttgtagtaaaaaaaatgatgtatatttagaaaagcaaagtttacataaggtcatgcagctttgtaggaagtcaggctagaacctgggtccatttgatgctatactcagcccattgcaaaggggcattgatcctggggcctgaagtttggcaaactatctatgggccacatataccctagatactgagagacacaagcagtctctatgcctctcactcatgaattcagtgttagttaagagacttttagctacaattaagggagaacattttttccctcacaaggagaaggcagagctgctacgctagcatgttaaaggtggcatctctagatcttctcaactctttgagagataggcagcttcacaacgttttagaggtggaaacaagaggggaagggcaatatcagaccaagctattttgtcttccttgtctctcatacttctggacaaatctatgtatgaccttccatatttctagctgcaagagaggctgccatgtgattattgagtcttcaagtctttaggaaggacagctttgttgtggtatctccaacccaaataagccctggcaatgaaaacaggactcaattaatatgaatacatgctgtgcacctagattgggcagatctactgctacactaccatcttccccatctatgagaccccttagaactttctccgagccatgtgcttctgctctgcttttcttcttcttcctcttcttcctcctcctctctgtcctcttcctcttccattttctccttcttctttctcctcaccttcagctccaccttcacttttatctgcccaaccatcagctctcttttattttacaaattaaggtgggaagcaggtttacaggaaatcacctgagtgctaactcattccttgttcgaagccactcacacgagtacggaattaacatctaatataattagccccagggctatccacaacacaacttgggaatcctacagaggaggcagactgtagtgtctactatattccaacaaatcattgtaggcccagactcacttctaacccttacttgaaggagaagcaattaattcttttggtaattacaggtatttcttgaccattctgagttgacctggtatgagaatatgggggaggcagtatactcactaccatcctggtgttgctggaaatgatatgaactagttccacatgtcatgtcttgaaaatcaagaccagtctgttagctcctgagtgcttattttccctatagccacctgcatatatcagcaaagacagagtctgacaagggtatagaggagggaaatatgtctaattaacagatttttctgaaatattttactgatttggaatacaattgagagaagagatgtaaggaatggcaataagagactcagatgaagaggcccagaaagactagctgtgtttggattggtgatatctttagaccagtgtctttcagctcgtttcattatggcccacatatggggtcttggtaaacacatttttcctctaaccatgctccctactgacatttcaatatcacaagtgcattaagtattgcactccttttatgcagaatctagcatgctgtgtgtctgtacttgtacataaaaggtatgaaatgtgttttccagtttagaggagacattgctcctatgtagaacgagtcagggacaaagggtcattttgcctggggagggaagagctggatctatcctttaagtttggagggttgtcacatattttgagtacctactatgtgccaggtacatagataggaacttcacatgcatcacctcattttctgtatcagacctgggccctctgtcacaatggaggccatcaaggtttgagaatacacttttctgaaagagacctgctttttctggaacaaggaacatacattgtttttattatgggccatattcagggcacgtggtatgggatgcgtcagggtgaagttcacagtggtactcctggtgggaggagaactggttctgaaggagaggcagcccaagtaagaagcatgacagaggcagaggctgtgtggctggaggggactttggatgataaagatgactctcactgcagagctgagagacactgcaggctagttgattagggttccatttctaaggtgttgttgagctaaagatacaggctgagttaactaaacatcatttctatcaggcacaaaggcattctaaacaggtttgaacaggagacagagacacaaaaggtaggaatctatggtctccaacacagggagtccatttttggagtggaatggagacaagttttggagcaaagtgcagtctgtgaccaaaaggagatagaattcttgtttggttttccttcctgaggctcttctggattgtttgccatcccttacagacattttgctgcagctcttactgatgtgcccagagcaacaaggatgcactccagtaggaaaagaacccccaacctcggtagtcattacaacgaagctctatttcctgctcttgcttcacacactgctcaggatatatgggaactagggcatctggactctacatttcctatctctaaagccttcattttaacatgtgtctccattaccgctgaagtaggggaagaaagcatgaagaatggttcacagctaaagtgtgacacatgccacatctgtttgaattgccaacctggaacaacctaaagtaaattgggaagaagggaacctcaactgaaaaaaaaaatgtctcaatcagattggcctatgggccacatctatgaaagattgtcttgatgatgactgaggagggagtgcctagctcactgtgggtggtaccatccctaggcaggtaagactaggctatataagaaagctaagagcatgagttgttgagtaagtcattaggctgccttcttccttggattctgctctgggtttgttccttgaattcctgccccaacttctatcagtgatgaattattacctggaaatataagctgaaataaaccctttcctccactaagttgattttagtcgtgttttttaccacagcaatataatcgaacacacatcattggcctagataggttacatgattgaacctaatatcaaagggagcagggaaatatagccttcctgtgttcggaatgtgaagagtggaaagtgcttgctagcaacactgagagtgacagtgacaatggtgatgagtgaagacagcaaatcaatttctgaagattcacttgcaattatttttttctcttgcctttctctctgaaatactccaatgatttcaccatttgtaccttatcatactgtctggtaaatacttattggttggctccaactgaagttaacacccctactgcaaggagtattttggataggagaatggcagctatttattagagtcccagtccttatatgctagccagactgtcagatatatggaacaaaagccaagcttcccaaggtggtaggtctaggaaagtgaccaatgacttgcctcagggttgtgaaacatcctgtgaagacactatcttatcattgagtcgtttaaatgcttgttaactggccctctgaattagaaaagcaagtggagaagcttgtagaaggagatagcttgttaatcagtgatgtaacagaagtatggcctagcataggtagtgtgtatatgatatattcttgcccaatatggagcttaaatgatctctttcctactaatttccagaaaggcctgttcctgttctatagataggaagaagcagtctcagagtggcctctcccagccagatcttcttagtaattcatgaaaaagcaaccaatatctactctgggtgcatctgctgagatgaacctggacatccagccttttcatcaccaagctctgaacactctccatcaagtgtcttcagattggtggagcttaaaaaatgacagccatttgaaatcgagtagaattgggtattattagaatagcattctaaattctaatcttttgcattgacttttttttaatagcttctactttcactaaaatttctgggccaggctcacagacattcaatttaaatactgtcaggcaagactgatttctgttccaatagagccagattttctttctttcctttgaaaaagaaaaaaaaatagcctgagactttttaaaaaaataagttgccacatataaagagcatatctttccataaaccatccttttaattctctatctcctaccctctagccttctttccagctttcattgatgagtaagccaggtgatgactgttgttgtctaaggtacctgtattatcactacattgttgtcatggtgccagacaaggccagctttgctatacctccttccacgtgctctttcaataaaaagatcccttgccaaggctcccaggaagtatttaagaaagatgcttttctgtctatcctcagcctgttactgcttcttgtcagctctcttccacatcctttcagccagtttgtcttcactgtttcacttccactctggtttctgacgtggagctaaggttgggataatggagatggagagtaccagtggattttgggactcaaacttgacatagtctgagtttcttgtttttccagttgtaaactttatttagcctatgagaacactgactttaacacctatacaccaagtttagctgtgtctttcccactgcttaatcactgatactatgggaactggggttgaggtgtgatacttggcactgcagttaatggcatctagagctgagagactatcctttttctttctctgccccagacttcttggcatagcctaacagctctcagtcttagatacacattagcatcatctagggagcctttgagaggctcaaatccttgctagcccaatgaaatctcaatctgagagtgtatgcctgtggcatctttactctcaaaattctcttcaggtgaatcagatgcatgcaagggttgagaacaactctaagtccctggggttgcccggggcctgaatatactttccttttgagatcagaagaattctattttattgcttgtgggcacaggtccagatttctcatcagtgctgggacagggttttatttttcctagatacctaagagaatgtagagaagaaattggggtggaaaagatacttggtgggttggaccaagcatcacttgagatctctgcatcatcacatccaacttgagggcttgtgctctatctgtatgtctgtgtctgcatttgtgtctctgactctgtgtctgtctgtctgcctgttgtgtcagatgccttcctctgttactttccaccttcattcttgaggcaatgattgttcctgaaaacaaagtttggaaattgtctataccagctggcttgaaagccccatgggccctcctatctcatactcccagctatggaattacaggtactttgctttttatgtgggtcccactttcttgtgcaacaagcacgttatctattgagccatctgccccacctcacaggtttattgttaaatgagtcttgaatctccttgcattagtttggatttttagaagttagaatcaggctgtattaaatggctttcttctgagcctgctgattttcttcttttacattttctgtttctcttctttcagccctccttacttccttgctgtcacacccatggacatgggcaaatgagctctgctcgtctgttcgtcaagcctcccagctcctccagccccccctgtgccccacgcctgagagggtgggtaggcagatggcaaaacttcccattctgccacttagggacacaggtgacaccaactaatgtcacagcaacaggtggggaggaggtttcagagctgagctagcaagggacatcaaattctcagtgcctcctgggcagaatacctcacctggcaccatgctgttggcagaaggtgcagcagctggctctgcctcagcttttggccaagccaaggataatgttgggtgagggtgggagctgttgcattgagggcagatttagattgtttcacatcccttagcttggtgacaaatggggtttggcccattggcttctctgatgcatgacaactcatgtcctcttccctctcctccttactgaactctcaaatctcatcttcagatcccacatttagggaaagtgctcctcgtaggctcttttgcagctccagctacctagctcacgacagttttataaccgtctctataatctttctgccacattgagctcttcttccttgacagcagagcccatttctcatcatgggtatatgatcttggagaatgcctggtactgtcagtatttgtagatgtgagtgaatctcatcttagtggacagcaccatttaattaattgtagatctatcttgcttatctattgaatgaaagacactggcagttagggtaagccaaatgatcacacaatctgaaacatatttctttaaggcctcaaagcactatccaggggaatctgagagagggcacagtttatctgtcttttcactcctatttgctaagtaaaaatgagaattaaggtgctatgagcatcaataattatgaaatgcctttcactgcctccctcttcagtatcacttcatctacataggttctatctagccaaggcagggatggttgtttatggaaatggacatattacttatggaaatcgacatgtctcattgacccactattgccaagataccatatatcaaggagcagtgttgtatagatcagacataaaggtgagtgggttattgcttgttattatgaactccattcctcatgctcagacttcttgccagtcaggtttagaggtctgggaaagtgccaaaggggttgatccaggccagcatgggattaaaagtcctccagggaaatcacatgtgctaagtgagctctctgaggttccggcgcaaggttgtgctggtcaaggacagcaagtcgcagggagtctgggtgaagccagtgtgtgttgctgcctcccttagtttagattccatgtgacatagtatattgaagagagaatgggactgactgagctgacaatagggctgatggtgccagcatcctcctccatctttgtgctacattgctgttcactctcaagaatcctgagataaaggatattccagatgaaaggtgtgggacccaagtcctccttgttagagtcattttcccaaagtcatgaagatagcaggtggcaggattgagatttggtgacattcttggcattcgccttgcccactgacccctactgccttaagagccagctgcctatcacagacttgacattagctgttggctgtgtgagttttaagtcacaacagttcccacagatacattttctgtaaaatagggatatttctggcttcttgctgttgaaggaggcttagaagactgaaggaagaaaggtgatcagcgaggtctaggaaagcttaggataagaaggccatttgcacttgctgactcctaagagtttttgggtcctggctgacagcccacatttgtcaaaggtgtctccagccctagctctagcatggtaatccattcaactttgagagctctgaatctcctgtaatccacagaggctgacagagggatggtgaggcagctggaggggggaggtgagtctgtccaaggaagatttagaactactctgatatgatatagatggaagtcacagggcatgccacagtttttagaggcattgtggcctgtgtgatatctactttcacccatttgaagaaatgctgagttcttttccatttttcttgactgagttggtgtgtaaacaaagtttccacagcttttgcttttgagaagagagtgggaggagctaaatattagaaagaaggagaaaggaggccatccaggtgcactagggaaggagggaaaccagtttctttgttaatcctgacttggggcaataaagacagctagtgtcaggcaacttctgtatgtttgtgggaggaagctccaggacctctgcagaggcccatatcccctcatgttaaaatccctttattagttagggttctcaaaaatttattgtgatgacttacagtctgtagtccaaaacacctaacaatggtcagctgtgaatggaaagtcccaagaatctagtagttgctcagtaccacaaggctaattgtttcagctggtcttttgtagaagtaggtaccaacagatgtgctggcaagtaaatgcaagcaggtaaagaagaatgaatctttcttcttccaatgtccttatgaaggcctccagcagaaggtgtgtcccagattaaaggtgtgtaccaccacaccaggagctgggacttgctttggcccaggctgaccttgaactcagagaacccttgcctttgtctcctgggattaaaggcatgtactgccttccccaggcctaagtttttcagggccattatgcctcaagatctccatgtcaagatataggtcagaaacttgtgtctttcagcctcaagatctggatcacaggtgagccctctaattctggattgtagttcattccagatatagtcaagttgacagccagaaatagccattacattccccaacttgcttcttggtcatggttttgttcaggaatacaaaccctgattaagaaaaactagtacttggagtggggtattcctttgacaacctgaccatgttttggggaggcctatggaaggaactttagagctctgtaggatgttctgtaggagcttggaagatcatgttgagaacattgcaaacaatgaaggcctggcttgtgaactttcagagggaagattaaagactgtaatcagggctattgctgttttgaatgtgaaggtttgggttagctgttgttgaagaatcagctgtgattaacaagataccataagtacttaagctaaacatttgcattactggggcaattgatactggttagctagagttaagaaattagcagtggttaagaagagactagcatcactaaggtgaaatcttctgggaagtgtttcctgagagtacagagaagctgtgttccagaggcagccatggctgtacctcatgttggcagccagacttgtcttgtataagagtcacccaggtgatattggttttgaaacatgaagggttagcagctgattcttggcactgtgagagaccagaagaggccattggtgaaggtgcagccttagtggcaggtgaaggcccagaactgaaggagtcatgcagagatgttgaggcttagcaccatgaaaagagcctttgaaaggctattgtgaaagtgcagtccagttacagcggaagacagcagtgttttggtgatgccagtaccatgagatgaccaccaaggacagcagcagcagtggagtacaggcagctggagcctagaagacaacgtctgtgctacaaagggcaaagctggagaagtgacccaagcccttggaggagcccagaagattgtgagtggatcccagacactggacagttagagtttgattttgcttttgattgtgactgtttgcccagctatttttccttcttgaagtgaaaaagtattttagtggagcccacagttaagagactttgaattgtaaaaagactttgaatttcaaaagagattggctattttaaagggattgaaattttaatatgtaaaaatttgtaaagactgtgggacttttaaagttatttagatcttggggatgaataagaaagtaagggttgaggcttaatagtgatgtgtttatgtgttaagttgacaagggatcagtagtaatgactggttttgtgtgtgtcaacttgacacaagctggaggtatcacagagaaaggagcctcccttgaggaaatgcctccatgagatccagctgtaaggcattttctcaattagtggtcaagggtgggagggcccaatgtaggtggtgctatccctgggctgctggccctgggttctataagaaagtacactgagcaacctaggggaggcaatccagtaagcagcacctttcttggcctctgcatcacctccttcctccaggttcctaccctgtgatgagttccagtcttgacttcctttggagatgaacaacaatgtggaagtgtaagctgaataaaccctttcctccccaacttgcttcttggtcatgatgttttgtacaagaagacaaaccctgatgaagacaggaagggaaggatttattcagcttacacttatataaaataacatgttttgtacagtacctatacacatctttctctgtgacttatagtatttgagataatgtaagcactttgtaaaacttgtgatgctgtactatttatgaagtatgtaagaaaagtgtctgtatgtgtttattacaaacacatctgcaactgctctttcatattttttcctgtggttttgttctatagttcctaaaactgcagatatagaagcttggatatggaggcatgattaataataatcattatcatcataaatgtccctactcagggttacactatgtggcagtactttctgttaatctgttgtgtgactgtgtgtgtgtgtgtgtgtgtgtgtttaattgttcatgtgaacatgcatcagtgtgtacatgtgtaggtcagaggactattctcttcttccattatgtgtagaagtaggttctcttcttccattattgagtcctggggatcaaacacaggtttgtcagtcatacaccttctctcatgagccatctccttgggccaaaggtacattatcttatttgatgtgttaaaaaaactacataagtagaatattaattttttttactattgttgcataggaatgcatttgagcaaaaaagaggtgaaggaacttgcccacagtcatattcttattagtgacagaaccaggattagatgtgagatgttagggttacaatcctagagtctcacttttagtagacaatctctgccatttctttgcagtgaattagagaacaaactcagagtatgagatagatgtgtggtttattatatgagtcagcagaaggaaattgtcttaagtccatttgatctactataacaaaaactctatagactggacaatggtaaacaacaaatatttacttcttgtggtttggaaatctgggaaaccaaagaccatggtgcagacaaaattaatgcctggtgagggccgaatgccttcttgttatgtcttctttgccatgtcttatataaggtcactaagtccatccatgaggctacctccttgtgacccagacattttccttaggtcctacttcctaatatcactgtacttggccttagaattgtacctatgaattgggtgaggtgaatgcattctgtccatgcaagaaccagtgttttcccaagtgatccatgttagctccatgaaccattataaagtgtgtgtgtgtgtaatacagtttgacttaaaagcacaatagtaagggattggaaacccaattcctaattcaaactatgtctgttaccaatatctgtttgaacaaatctttctttttttcctcctttgcaatctctagaactcaggagttctgatttctatttaagtctagaaatgtatccatttctccttaacttttttattaaatttttatcaatgaattctacatctggttgcaaatattaaatgaaataggattaaaaaaaaaaaaaaaagactcacttgcccaccagcctttggctgctgttttctttcaggaccacggacagggcctagggtggtaagcttgagatttttgttccatttatatttcttggcatttttctaagcgtataggacaccacaatacccttctgtgctgaaatcagaatgtatgctaccttaagtcatttctgaagataatatgcagagtgagcaactgccctacttcctgcagcccttgttgggagttaaccatcaagaacaccatatctacctttaccattattacttccacaaacaccactgtcattaccacattattgccaatggagctctccatcatcaacactatgtatactaccccccccacacacacactgacatgagcaccatcaccaccaccaactccagtacttaccatcacaatcaccattgctaagataatttcaccattaattatcaccattatcacgagtgccaactccgtcaccataactctccaataccatcttcaccacaatcattaccaccatcactatcacttctaccaccaccagcagcagaaatattggtagcagcagcagcatcactaatattatatccaatatgtcataattgacagtgccaactaatcataactattttcaaaaccattccattcattattattatcactgttatcaccatcattaatgctatctcccccaacctaatcatcccaaacactatctccttctctatcagcaacaacagcatcactaccaccatctctatgccaacatcatcatcaaacactcctattgcaagcacttactaagcacttgccaggctctatgttgtatgctttatttctaccatgtcttaaaatgtattgccaacttattatttgttttatttttatataccagtctcaaggacctctagtatgaagttctaatttgggatgcagataattgggcacaatagaagcttagaaaaggcagaatagtataaatgttttgtgggcactgcaaatgtggtagtaaaatagcattagtcagccagcaacaattagggccatggaaatagaaaggatggtgaggatagccatacataaagagctttctgaaggaaggctgactttcagatttgcgaactgtgtgaatgagtgaatggttgatcttgacatcactgctaagcagtctcttccaggttctgagcatgtggttaacaggcagctctattctcagtactggaggagacccccaaatcaaatagccatcctcctacatgataaggactggattcaggtcaacctcagagaagcttttgagatcatagaatgaggtcaacttcaatacacagtgccaaaggtttggcttcatttaaaaagccagaggaagccataataggattgtgagttagagacttacctggctggatcacttatttaggtgaaactgctggtgctgttgaaaatgggatggagataagaaaacccatagaaaaactgcagagatggcatgagagtatgtgctgctcttgccaaggacccagatttggttcctgatatcctcatgatgtctcacaaccgtgtgtaattccagttcttggggatctgatgccctcttctggccaaacacttcgtcatataaaataaaaatgaatcataaaaaagacatttggaggggctggaaagatggtccagcagttaagagcactggctgttcttccagaggtcccaagtttaattcccagcaatcacaaccatatataatagtatccaatgtcctcttctggcacacagatgtgcatacagagagagtactcatatacataaaataaataaataaatatttttaaaaaagacatcggaggcagggcaggcatgcagaacaaatcacagccaaggcagcatcaggatcaatgcagagatgaggcagaagggagtgaagggctccagtaggtgttcatggctagttcatttggaggcagttgatagctggcctggtataccatcattctttccattcctgcttattcttttcatgggatcagggactggagacttattaatgctattctttggcttggttatgtgcccaagatcaaagctcccaaaaaccagatctcatgactgccaaaggctatttctgcatttggagcagttctgtttgcgttaacttcccagccatcactattctcctcaattccctgtgctgaggttaggcactgctgaatggcagggtacccttcctgtggaggggaagaaggggagagattcagcagactccaagaaaaatattaacttgacatttagcgaaagggtaaactggtttattgcactgcaacagagatgtttgcattctgagttgcctcctgttttcatcctcttggtggtctggctaggatgtggtcttgactatgtaaatcaatgtggtaatgacataaggcagctatttagttcgaagtcgattcccaaccccaccccggcctcctaccacccacacccagcgaccccaaggttttaatgattgctgagagtcactttctgacattttcttccctgatatttctaaagttgtaacccaacacaaccaatgtgtacaactggacatgcatgttgtaataggacaccttgggttcctttgctgcctccaccctgtcctggatttccagctaccaacagtaaccacctgtgggcaggaaggagcactgaaggaacagtgcatcaggagtaaggggaaatagaacaaagtgtctcccagagctgtgtaaggctttatctttaaagggcctctgttcctttattatctcacagtgatactgaaatgaaccaggcaggtccttctctatggaagaaagcaaagccttaggctcttggataccaataatgtgccaggcttgatacaactctataaaccttcttccagagagttagttcactttgtcactaacagaaaagttcaaatcccagcaatcatagttcccaagtaagactgctttcttctttgttgagccacggtagtctcaggatagagaataactcctatgttggtgggaaccttgtggtctattgagacgatggaatggatcagtctctaatgagtcttcaagaagtctatagtaatgccaaagctacactcttcctgtttacctcctgggtggggtgggtatgtatgtgggagcaggcatatgcatccatacatgtgtgtacagaagccagatgccaatgtcaaataccttcccctataactcttcattttgagcccctctctcactaaatcattaccaatttggctagactggctgctcagagcatcatgaacctattttctctgcccgtatctctagcatcgtgcttttagatgttcactcactcctgtctctggcttttatgtgggtgccagcggcactcaggcccttgtactggggcagcaggctctttaaacacagcataatcttcctatccccgacatgaggtttttttttttcattctttctttcttttttcttttttttttaaaaaagggacatgtatgtattggaatagagttgaccttacttgatctgcattcacactttaatatcattgttgatcctcagggaaaaaccttttcaaccttttcacattatggaattcttgtgctagtgaggaccttagatattgctatagtacaaaggctacaaaatggctgaacatcggaatgccctggggggggggttgccagcctggactgactaaatgtaaatgtgtagagttgatagtttatttttaactgtcactcttccttctagtgtttgggaacagtgatctggcttatcttccagctcccaggcaggatgttcacagtgagatttccccagtagggatactcttggccggccctcacacccttccttctgtttctaaggaacatggctcttgcccacttgaggtaaccgtatatgatttctcttctctttttaaagcacaaagggtagttcctgttggcaaagggaagagcagaaacgttcagcttctgatacatctgtgcacacatctgtgttcggcactccctcaccacctctagtaattatctgatgaagatcttgaaggacaaacttcaatgaggagaatgcagagcatcaagcagaatagcaccataaggtctcttaacctctaagaattcataacaagtatagaaatatattaataaccaccagatgaccgtgctcttccgtacagtacttatgattctgacagctgggtggcttatgagcaaaaatgacgggcatgggctttactgctaccctgagtcaatgtcctgcctgattgtctgtgccttctcttgttcttgttgtagttctcttgagtacatgtcctcagttctctctctgttatttttgcatctctggtccagagtgtgggatgtctggacagcaagataggtctgtgtggcaactgtaggacatcagaggcgtagagcattagatggcactagtggtacccacttccttctccatgtttgcctggtatcttagcctcagcttcgatatcaccttgagatgatggaggccagatgtcaaaatgtcagagccacaaattaaaccagctttgatccccaagttatttcttttgaaaaacataaacttggagagccatcgacaaaaggggactttacatgattaagaaataaggattaggggctagctagatgggttggcagttaaggacacttgttgctattgcagaggaccatggtttgtttcccagcacacacatggcagctcaaaactgtctgtctataagggcagtcccgagggatgcaacaccctcttctgtcctgtctggagagcacaaaacacacatgtggtacacagacatacatggaggccaaaaattgaaatatataaaattaaagtaaatctaatatttttaaaagatgaaataagaattaaatttgaaatcttgggatttcaggggtcactttatttccatggtataaccttgcctctcctaaacactacagttggtatctgcctgtggccgacctcacgggtaaggctttcgattctattatttgcaggttgtttctcctcttaaaaactgaatggaacgagacctttccaggaatcctctcaagctgcagtaatggtttactgaagcagaaagaacatggttattttgagtcacaaaagaaataacaaagcaaaacaaacttaggatggttgccttcccttctaaaatgtaattaaaaaaacagaggcatatggacaaggggaaaataccaacaacactgcctgatctggtgtggatgtgttcctggaaagtattaattacacgcttatgccatttaaaaatattaattcagatgcacgcagcttgcaaatcccttctcattctgtctgctggatgactcgggacaaagctagctgtgaattaattgattaataacaagctgtgctatgcatgttttcactgacaatatccttgggacggcctcttggagccaggcttctgcttgtgggagaattggttttagtacagtgtatatttatttttacccctattctcaagctggagctttgtcatgttacacacagggaagtgacttgtctgctatcctaaaatatggtgggactggtcaagaagaagagagagagaaggtgggatgtcaatcagaagatctgtcccatcgtgcattcttgcccagggcatggactggctggagcccaggaataggcagcctgctgagactatgacaaatgtatgacaagagtttggctcagaggtactgagcactggacaccatctggagtcctcctttcttctccatgcttgcccagggtctcagactcagctcatccagagccacatgcaaatgacatccttcagggattgcttcctcggaagaatgtctacacggaggttaagggtgagacctgccaagatggcaaggcttgccttttccagcacagattgtttcttgaagaatttctttttatctgtatgtttgcgagttagttgagaatgaaagtttgcctggaggtcaggggagagcttaagtgtgttagttaggttcagctggagtctgctgtaataacatgtaacttccacagtggtagtatgacataatttgtctcgttttctacccccttcttgttctttttgttcttgttcttcttcttgttctttgtttttgttttacttgttcttcatttctttctctctttctctctttttctctctctttctccctgccaacacatcttattgagtacccctggttggccagaggtttgctatgtaacccaggcttgcctcaaacttacagtgatcctcatacccctatcttcagagtactgggataacaggtgtgagatgccattcctggcaaagattttttttttaaccattcagtgtaggtatatattagtcatgaaagtgtgagtgcggaaagcatggtggctcttcgttataatccctgatctagcctctcgacagtgtttatacatcttggcaggaggcagtggtcaaccaacattgctcatagcatattggctaagagaaccacttgaccatagttaacctctagacagtcctactggctatccagagagaggaaagaagtcgagtgtttgtgagcatcacttctgacttctgaggtgagaaaggtgtgggttaaggagggtttgagggagagtcggggaccctaagcttcttagggtcacatctctgtctgaagcagctctgatgggaaggattggggaaggaaaaaaaaaatcttcatttgtatcttgtcctagaaggaactaagaataactctaaatctatacaatctcccataaagtgtgcaactcatatccctgggagcttcaacagcttgtgttgttcctaaatatctctatatgggaatgagggtaaagtggtatcccacgagtgcactggggacagaaagaagtgtgtcaaaaaaagtgacatagtcaagatgcaaatcgtttaggccaagtgagaaagccatacactttgggttaggctccaaaataagccaggttcatacacctttcatcttcccaccaaggttatgcacttattaaagtcaaggattatttttctttgtatgtcacctgcagtgtcccaaatggctctcgaccaaggggacgcttagctgcttagtatgtcttcaggtgactagatgcaggatgagtatgtgtctgcttctccccgtgcttcagaagccagggagctgtggagtctcctgtgcaagtctccttggtatagttgggttctgtgactcttaagttaacagggctccagggatatagaccttcctcagatgtcctctgctggtcaaggggaccagcccctcagattataccaatggcagtggcaacacagaaagcccaaactgcgagttgatggggtgcatcaggcaggcaaatgacagccacatgaggaggcagtgggcatatgggtaatggtctggacactgcattgggggtctcctttttttcttgcccattcatttgattattctcatttgcatgctgttacaggcttactctgtccaaaatgagaaaaggggattgcaacatcatggtcacactttgtggggaaggggtcatgtaaatgcatttgcatggtctttgtcggcagtattttttttttttttttagcagtatacgtattttatgacagagtctaggatagagctagggatcagtgacagacagagcctccgctctcatgggctgcaggaactaatgtggtttttggatgtgatatggttcccctgatgcatacagcttcacttttctcactcaactatggaccttcagtgttaaatggaaatttccagaaatcaacatctcatgttttaaatcacatttattacagtgcattcctataattgtcctattttattttttgttatggctattaatttcttacttgtctcatgcataaattacattttatcttaggcatgcagtgcaggaatatacacagagagttggtagggtttctatgtctccaggcatctgctaggggttgtaggatgtgtcccctgggtttaaagacataactgtgtttataataagctaaaaatctacagatattgaccaaatggctttagtctactgggagacacaatacacactcacatggaatgtaaaacctgagtttcttagggccacttccctacctccaggagctcagatgggtatatgaatcccaaggaccaaaagtcacggattgttagtcccaggtgagaaagcacccacatggcatggcagatggacagccaaggattttggaggaaaagggtagattgcagatggctgaacttttaatggctgtgcaggtttgggcttgagtccctcctgtttccttgaatctctcatcactaagaagttgaaaggttggtgtgagttgctgtcttatgcctccctaccctgtgtgtgtgtgtgtgtgtgtgtgtgtgtgtgtgtgtatgtatgtttgtgcatgtgtgaatgtatgtgtgtgtttgtgtatatctctgtatgtgtgtatatgtgtgtgtgtctatgtgtgagtgtatgcatttgtgtatatgtgtgcatgtgtgtatatatgtgtgtgtttgtgtatatgtgtgtgagtgtatgtgttagtgtatatgtgtgagtgtgtgtatgtgtgtgtatgtatgtatgtgtataaatgtgtttgtgtatgtgtgtatatgtgtgtttgtgtgtatttgtgatatgtgtgagtgtgtgtgtttgtgtgtttgcatatctatgtgtatgtatgtgtttgtgtatgtgtatatatgtgtatgagtatatgtgtttatgtgtatatgtgtgtgtgttcaggtacagatgcatgtatgaggatgagtgggcatgtagaacccaagcatcaatctgagctcttattcttcaatatctacttggattttgagacaaggtgtctcacttggacctaggcctccccagtttagctagtccagggatcctcctatctctgtgctgggatgacaagaacatgcaatcatgctactataaatgctattctcattgctttatgtaagaactggcttctaactttgaagtggttagaccctcacctgagggtttgaagaggcagtggcccaacaacccttgtcccttcccgcctaatgttccaacctactgaatgccatttgtcagctttggcctttttccaagccatattcagggctcagtcgggaggcaagtggacccctagaattccaggtagcaagtttaggggacagggcatagatactggggaataatggcattcagaattccaactatccccaatatgcctctagaccttcctttatgttcctgaggccggtaacagtcactcttgtcatcactgccaaaaccaccaccagtgccacttgctttcctagttacacgaaccttgacttaccaccacttgatcccaccaccccacctgtactctatggctaatctcaggggaatccaaatatggtccccatgcagtccccacagagggctttttacagctcatgtccattatacagctgtctatgtgagacaagggccatgatggcatgatggccaatgtttaccaccagaagcgaccttcttgctttggtggctggagaaccaccctgcttagtgatctgtaccacttcctggaggacttttgatgggacttgacccacatcagaaagaacctgctttgcctcaccctacccctggcttcctgcttgagtgatcgttcctatgatcactaaaagtgttcctttggatcctacactcagcttgctacttttggattagctttgaggggcctctgggttgaagatgttaccctcactttataagtataggaaaggacatgccttgttaaaatgatatcttcagggctgccttgtctgagactcacagcttgcctctaagaaccctgacccttactatcttgattttggtctgtgcactgtagacatattgctctgagtctcagagttatgagaactgacccaaattgcccatgtgtgcctatcttggtatcatagacatcatctagtcagccacatatactggtttgggcagaagctgtgtttccttctctgtcaagtagctgccaacccttttcctcactagtatttgttggcaagacagtaaaagcatccatgagttaaagacacagtgaaatgacacttgaattctccagggaatgattctgctatgatggataaacatgttaattactcagaatttaatctccagctgccgcctttgtggcacttctccgcacagcccgagttgggggccttgcaggctggagtcaaaggagctgtctgaccctggggaatatcccctctctctaaattctgggctgctgtgttcatggggcacctgggcatacagctcaagtcttttcctaggaggcagcaaatgtagacagttagagatccccagctctggcactcttgtgtcctggattcaaatcccagtgcttctgcttaggcatctctgccccacatttcctaaccatgcagtgagtggttctaaagatgaaatgtgtttatatgtgtaagagacttcaggggaacctggtgtctaagggaagcaattgttaatcgtgttgtgtattgctttgcccctcccgtaggctttgccggtttgtccttttctttattttactgccacctcctttcttctcttgggtaacttgcagctcattttttttttttcctgagtctgattttagctctctcagcagagaggcctgagggcgtgagatactcatatagacttctaggatgagtggaacctacccaccggttcatttcattaacacatttcacaagtgggatggctcagtgtctgtgacttcccacacgagcatgagggctggagttcagatcccagaacactggtaaaaggcaagcaggcattgggtcacttgtaatcttagcactgggaaggaaaagacaagcaattctcagggcaagttagctggctagactagttcgaattggcaagttccaggttcaagatgaggccctgcttcaataaataaaatggaaatcaatcaagggaaatccccaatgccatcttttggcctttgcgtgcacatacatgtgtctacacacacatatgcattatttatgcacaaacagttttttgtcctttaaaaggagagttaggtatatgctaggtcatgtgtcaagaagtgtgcctacaacctccatgaagatatggtctgtgactctcagtacctccttatgggaagcagaattacaaatgagccatactccacagcatgaagtagtggatgttttgacaggaaagaggattttctccactggagcctccatgacacctgcatatcttgagaagcacagggtcgtgggattcattgtctaagacctgtgactgaacaaggctttggtgtctcatgtgtaacattgggcaaccattttggcttctctaagacgcaatttctaaccctgaaaagtggggatagctactataggctgatcaggaaagttgaaagtgagcacaggtctgaaacactcagaaaactcatactgccaaccaagaaaatgagacaggaatccctgttaacccaagtgggatggtcttcacctttaacacagcttgcatctcagaaccttcgataatggaacaaggtgcctagtttaagatacctcatactggggggtgggagggtgtcttattttgattttcattgctgtgaagagacaccatgaccaaggcaactcttataaaggaaaacatttcattgggtctggcttacagttcacaggtttagtctcttatcatcattgcaggaagcattgcaccatgagggcagacatggtgctggaggggtaactgagagttctacctctggatccacagggagcaagaagtgacagctacactgagcatgaattgagcatctgagacctcaaagcccaccccctaatgacacacttcctccaatgaggccataactcccaatagtgacactctctatggcctttgggggtcatttttatttaaagcaccacaaagtctgaagcagcaccctatttatccaagtctccttggttgccaccttttccatcaggtcctgccccatgtaagccaagcagctggaagggatgactccagcctcccaagaaactaattaagggctttccagcttgcaggttgcattccaaaggaccatgaagtcttggctcatggcactaggatggttcgtgactggtaggatggttaagagtgtcaagaagatccagtctccacaccagaagtagattaatatcaccttgacttaaatttcctgatggggaaatttcatcagcatttggtaaaaaacaaacaaacaaacaaaaacaaaaaaaataaaaaaaaaacaaacaacatctcagtatcaacaggtgaagtaacccagctgctgctgcctggaagtttgtgtggggctggtaggggatacttgggggtggaggggatgcagtgaggctaaaggaaacagcaggaggaaagcactgtgaatcttaggtgtagaatttgcccttcagactttgttctgaggtttgcctgcccaagaatgggttgtggaaatgaatttagaaactagtttccccagccgccccactcccagaacatggttctctcccctccttatcctcctgtgtatttatgaacacagtaagacttatcctcagtggacagctgatgattcccagctttctagggcatcgtgacgaatgtgaccacaaaagaacaaagaatagcattgggaggcaggtggaaatggccatggtaacaagaggacaatcttgttaacctcccaccccttcctccctgtcctcccccattctctcctccctctctttccctttttcctcttctcaacccctctctcttctccctcccttccccttctctcttcctcctcctccaccctctttctttctcttcctcacctgttggtcttcaccttctaccatgtttaaaaatgtttcacttttttcactaaaatatggcagggtagctattccccctactttgggtatctcctgtctctccctgctatcctgttgtaagaatatggaattaaacacacacacacacacatcattgtttctggggggaggtttgtgggttttaggaatccaaacttaagtcctcacacttgtaaggcaaaccccttatacatacagctatctctctagcctacattaggattttatgaagctagaaagattccacattgagttgccaaggaaatgtgtcccttagatgatatgagtagtgtagcatcgggagctacacaagaaaatcctagtgtgggttgttttcaaggtagagtaaagttattcacctggggtgtagcagtggaaactctgaggtgtggtacaaatatttacggaagcagttctcatacatggtggtatataatacagtcaagaacagggtcagctcaatccattataaactgccaaatgtcctcatcttactaaggagggcatgaatccagaggtcacgtagaaagttagtagtggcggcactaagactgtaatgctatccagctgttctgtcacagagtttttccatcagaccacattccctccctaatgtttagctttcatcaagccccttcacctgtcagcattttactaagcagctatattctttgacctggtaggaaagacactcttggcgatttggtttggcacttggcatcatgagtctggaagagttgaagtaacttgcttcaaattataagctctggtagattccaaactccaattgagacattggacagtctaaaccagtgctttccaaaaaggggcacccataagagcagcatcacctggcagtttttaaggatgcagactccgtcatctgagtttgattacatcctcttggtgattatgacatatgctcggctttgagttggtctatgacaggtaagctgacgaaccttccaggtgtgcctcagccactcattactatgctttctaagtcgaatcactgcttcttgccaggagagaaacttcaaggtcactggcacttcttagcagctcattttctggtagtttctttggaccatgggattcttaaggaagcctggcactgatgccccgccacccagtggggtctctgagtctgaaggaagcctaattggtgttgttgaacctttggggggcctgaggagattttgtgaatcctgtctgctttcatgcagatttgagcagtttgacccagtcgagtggaaaattaaaaaaccagaaaggaaggagatataacttgagacaccaaatgttcattgcaatcagggcacttcctgacttctatatactgcacttgggagaccatgaggagagctactgtcatttcctacttgattcactagacttctgtcttgtgctttccaaatgccaggcacttggctttagcatctttagtgtataaagatgaagtgatatggtcccttcccacaggaaactcactgtctagtgtgatgtctgatggcagtaatttctatcagagaaaatgtagtggcttttaattgatgcagccaacctacaaggtctagccaatagaacatcgcataaaaataatcctctgattgccccactggccaggggtagcttcgcacactgtgtaaggcagcgactctctggtggtgtgtggagtaggatctgataaaacacagtgcaggggggagggtctgatgaagactttcttgtttaatgaaccatgtcactgtgaacagctgtggtgtaactcagccagacaactatgcaaaccagatgatgtctccagtggattgaatcagctttgatttggtttggttggttctccaaaggcaaattcttccaagttgggtggggaataaaaaacaaatcaccatcccaactttgcttttaacttttaattattggatggcttttactttcaagtcttcgaagcaaacagggaatggctgctacccagttagcagcaagagagggccaagaataatcatgtatctgtaatagctattagtgtactgtgcataagactcgcagtgtgttttgttgatgagcttccctgtgggtctataagagacagaccaaaccaagaccattcctgattagtcctcagaacagtagggctccagctcgccaagctgtcaccttccgttacataccaccaaatgtgagtgcccagctgaacatcatgaatacaaatgtgttccatgtgaaactcttccaataccctcaaccattttcaactctaagtgccagtgccactgtgggtcatcactagtgtcataaaaaatcaaatagaatataatgtcatagcacatctcttcatacctagttgggttactactgcttcgtgaaactaatttcatttgtatgtctatggtatgcaacctctgaacaacattgtaaaagccattgatgaaagataacgttcacttgggatctttttcacatccaaggaagcaaggcactcatgtttggtttgcatgcgattgtaagattttgggctgatggtataagggtatccagagagacttgagaccaccttgatgcagagtggatttaccaagtctgtaacccacaccagctgtagaccagaggcaggagtggtgtttccatggctatctgggcctcactgaaggggtcactgtcaagttaacacaaccaagttggctaatgagcatatacaaagcaacagcttagaagcaattctgggaagaacagggtctctttgtgctatgttctgagctgttcagcaggggtacaactgacacccatacccacagatacaaggctaggcttacccaggcttcctcttactacatgtctacatctgatacattttgatagtttgttttccagattttttttttacttttaaaatttttatttattaacctttataaaaagatttatttcacgtatgtgagtacactgtccctgtcttcagacacaacagaagagggcattggatcccattacagatggttgtgagccaccatgtagttgctgggaattgaatcaggacctctggatgagtagtcagggctcttaaccacggaaccatctctccagtctctattattaacttgttattgattctttatgaatttcacaccatacactctagtcccactccctatccctttgtatctgccctccacctttgcaacctcctgtacaaagaaaataaaccaaaaagaaacaaaaccaaaccatctagtcatggaagcagtggcatgtcacacagttcactctcttgtccttacatttttatttagaaatgtgcattgcaacaagtcattgttctggcccgaggcctctggcctctgctacactgtcagtattggatcctcactgggacatctctcagatatcctgctgttgccccgtgtcatggagaccctgagctttgcatctgtaggaccagccccttcatgtgctccagcagatcatagatggggtagatgttgaggtgggccaactcaaagccttggatcttggcctgggtggtagctgacttggtcagcttgccagctctcctgcactcatgccaccaggactagctctccagcgcttgccccgccagctcacccaatgcagcagcaagcaaggggttgagccagctctccagcgtccatctgtttcactcgatgttctgtttcatttgcttctctcctctactctgttctattctcatcccatttgtaaaatgatggtaaaggctccctaaatcaatttaatcttccactaatgggttacaacctgcgacttaagaaaaaaaaagaaacaacaacaaacaaaacaccagatcacattatattaaaactcactttcaatccctaaatcctatgagtccaatgtaaatcgccactgttatattagggtatgagattttatgtgccacaggttcctagttaaattgttggctcacggaaaaccatctgttattaattcactcattcattgggtctgtcattcattccattcattacttaggaaccaggtattatgtgaggccatgctgtcctcaagtaaataaaacagaggagcccttgcttttgaaggcaggttccctggggttgccaccatctcagcagctccttgcttagggtttcctttgagagagaaaaatccttgaacaaggagtccatcacaccacccctgtgctattgagtgaaatatttagccctgaatcctggtccactggcaaggagcgtcacattctgaaaatgacctcagaatgaacataaaccaagacgcaccatgctatggaagccctatttcctcttgtcttgctccctccgcagccccccaccccatgcaagtagcttaaagggaagagaaatgttccctaattacttgttgtatattggtttgtcttgtccatggaccactaatcctgcagaccgacttgcagggcctcataaatgagattgctcagagcagaaaactaatcagatttctcacatttagctcagctctctgctagactttagggaagctcagcatacaggctcctttaaccatttcccaacctgaggttacccttcatagggccacagtgatgcagaggacttgaatgtgggatgaaggctgcaagctggatcttccttaagtctcagcaacctcaagccacttcctgaagaccccttcccttcccctctatccatttctcaatccacctcctgccattctccacttgctttgtgtccatcctctgtacccttgtttactgctgctcctcatccctcatttgagcagcgaaatagcagtttaaacactcccttaatgggctcttgtgtccgcaggtccttgtgtgtccttttgtctggaatgcccctcctttccacgctttcccctcactgcagcactctcaacaccaaataaagtgagtgcccttctccccacagtctctttccctaagctaacaggactggctgccatctagaggactgtgcacttctgaattggatactgagctctgtgatatcagtcacagggctggatgtggcactgtgaccttctggttcaattattatattacctgagagccagaaaccccaaaccttgtcagcggtgtgcctggtgtgtcccctgaggtaatccattggaatgacagctgactttaatcagtaggagaaggatctgggagacgagcaaggttcgcctatctcagtatttacagaagaccatgctcctccagtgcctgggttggtgaggctgatccttactcttgaaatactgggatttgcctgtgactcaagtctgttccagcattttctttgacagatgagcaaaccaaggtctagagccaacgtagcttacacaaagtcaccaagaattgtgaccgcccacatagggggattggttgctttggctttggggaacagggcctagtcaccatttctccttcctctcatttccactgtcttctcttaggtatccttgtcgttccttagagctgaaagacagggatgaaggagcagccattgccatggcaaccaactgaaagcacagtcaggctgttctctctatggctgtggctctctggcggcagctgcaggttccagtgctgggccttaatggtggcactgggactattcaccacacttatggaggagaaggctgcttaggaaccttgatgcgctccaacataaatcgcatgggctccgcagagagggaccatgcaggcctcgagttctctttgccttctcctaacaatctctctctgccagactcctaatacggtgtgtggctcctttgagaagactttggtctttggatgccagcatcagacttctgaacagacagtgactgtgatggggatgttctgtttttcagtctaactgaagaaagtctaaaatgaagatagagttgggggaaagaggaaagaagagatcctatttcagtctcccaaaacttccatttatttgttaaggtggggccttaacaacaaatggtctgttctgttcccgtggtcctgggagtagagggggcaggttttgtgggatggttctatctggtcatctcatctctccttctgcctcaatgcctatcctgatctctcttgtttataaaatgctctagaggagctcccatcctaattcaccccacatctcacagtgccccactttaaggctgtcctcctaatggaagggatggatggggtggggtggatttctcttgctgtctctgaagctcttctgtctatgggctggagctcagaggcaactgaggttaatgcagcgagctttgaacttgaacttcaagtctcaggcttttatgatgatgacgagcatggtgtgtgtgtgtgtgtgtgtgtgtgtgtgtgtgtgtgtgcccttaggtgtgagcacatgcatgtgccctatcatgggacatatgtgtaggtcagaggacaccttttgggaattggttttctccttttgtcctgagttctggagatggaagaccaattatcaggtctgtgtggcaaatatcttttacctactgagccatatcactggctcagatctgtttcttctctctctctctctctctctctctctctctctctctctcccctctcttctctcttctcaattctattctctcttctcctttcttttctctctcctctctctctctctctctctctctctctctctctctctctctctctctctgaaacagggtttctctgggtttccctgttgtagccctggctatcttggaactcactcagcagaccagcctggccttgagcttgagatcagagatccacctgccactgcctcccaagggctgggatttcttatataaccacattggtgttttgcttctagaccataatctccataagatgctaacatgcatggtatctgaggcagctgctcaagactgacctggagtgtccttggatcaatacctctgacatcagctctccagtgcttgagtcgtgggtcagctgtatgggtttaggattgcagtaggggtattagaaagtcaccaaatgggacttggtcactagtgttttaacaagcagcacagtgcgactgtgattgcacattggtctaaaagatcagttccagcaatttttcaaggtgctaagtgaagtcccgcctctacatctttgtgccaatcacccacatccccatgctgtgactgcctctggaatcttaactgtcatactaccagagagtcagaaagcccaagcactgtttgttgtgtgtatctgatggggtctcttgagatgatctgttaaaatgacatctgacctttatcaggtgaaggacctggaggctcactgctctgggtaatgcatggactacccatgaagatccaattcagatgcatccatatctaggaatgtgcttcagctccaaactgcatagcctctgctcttagggcctatcaagggggaggaggaaaaggagaagtttttcctatgtggctgatagagaattgtaattgagtctagtaatcaaggctgcagatgtggcctggggagatagttcagtggatacaggcttgctatgcaagcttagagactgatgtttgggtaccaaaagcccacacagaacagtgtgcctgcatgtactactagcacttgggaggtggagacagatgatcacccaggacaagctgggtaggaaaactagccaaattggtggcctctggattcagcaatcagtgaagttactggcatcaacctgtggcctgtttgggaagtgtatgaaaaagaattgactagatgttgtgggtacttactttatgatcagatactcatggccattatttctaggtgtgagtgtttgtgtgtgttagagagaaagagagagagagagagagagagagagagagagagagaatttgtcttcaccaagcctcaagcatgatttcacagcacagtgcttaatacagtcttctgcaccgtcacccacacatagtgtaccccatagacatgaacacacatgcacatgtatatcatacatacgtacacaagtcagaaaagaagaaaaaagaagtgtgcaaagcttttataatattgtaggtaaggaactgagagcagaggaaagtactgtactgctcatactaatgttcagcagaaactcttgagtgttgagtttcaggcttcagactctgcaggcttcttgctcatcactgtcccaggacctggcctgctcctggagcatcatcctttgtcctttgaccttgcacatgaccctaaatcacatggagaagattcgggtagagtgtgtatgcatcagtctggataacagactgtaaggaacactgaagctaggcagagttggaatgggaggggcttcctctccaaatcatgacgtcacttgctcagccctcattgggggcagtaggagaaataaaatgcttagtatctttcttattcctcagggaaccatggctaacatttattaatatgttgggaaagaggcagttttgctattgataccttggttggtatgtgtttatatgagtatgcatgtatgtatgtaagtttgtatgtacctggaaacatggaagtataggacagctttggttgtcatttctcagatactgctgggcagtgcatttcttttccctgttctctcctttccttttcgagtgattgtaacttgctgatctagaagcccagggatctgctagtgtctgcttctccagcactgggattgtaagcatttgtgaccatgccctggtcatgaccaagccttcctttctcaaagttcaagactttctttacacatgtttaaggattaaacacaggtccccatgctagcaaggcaagcactttgctgactgtgccatccctctggatttgttttttacttttatttttttgaatggaaactccttagacagatttattttgctaccggggaagtaccagccagtttgcaatcacctgagttatggaaacatctggagagttcatttaggctcagaggctaggaacatgtgaggacttgcatgttcatatgtatgcagttccctccatgagttgcacatttccacatgacatcatggaaaaaaacccttcctaagctaactcacaggtgtaaacacgctcatccgactggatccagtaagaaaatacaattttgataacaacaacaaagcatatttatgtactcagttgacgtggctgttcagggtgtggaaaagacaattgagatagctaggctcctttgggagaagaagagaaactggcttttatagacacaggcagtagcatggcacatgggcacagtctgcgttgtccacttggaggatcagaattcaagcctgaccttgctgcctttttatttgtgatcttgagcatctttctgatgctttgaacgtgagtgggagctggcagtccattcacagtgtctccttaagagcctttcaaggataaggaaacctggtatcttattgataccaataaggcatgcaatattgagcctcctggtcttagactcagatccggtacaggcctgcgtgttgaaggaaggacccatacacagccctgggctgctattttggtggcatgtcagggttaggaaaccagcagctgggtggcttcatcttcccagttgtgtctgggcagcagccggtggcgtcatcttcactgtggcgatctggaacagctgctggggtttaagcgtgcacttagaggaattacctgggatcgtagccggccttactgaaagggaacacatttctgtaagccgagctaatgtctgaggctggcgcacaggggctttccttccacagcaggagagatatcaacaacaggaccaggctgcctggagaggctgtcctaaataggaaccatgatttcttccaggatgcatttagtttggactcaggttggagagcatatgaaaagactgggtatggtccagagatgtatttttcatgtcaaatgcttaaagtctctaggtagctctaggcaccatggaataatggatagcttagctacaccttgaagattcctccataagcacatttcatgctattcccctgtatgtctgtgtcacagtggtcccctgaggtagttccatctcttcctagcccaggtagtctgaagttattcacctgtggccctacataggtggggatactgtggctattttctggtgactttatcttcttgtgagatgtgagtgacaaacatgcaattactagacacaaataaagagaatagaattgccaaagtaaaatcgaacttaagtgaggtcgatgtgtagaggtctgatagaaatgcccctggagctctggaaagacagaatttggaagcatggaagatattgaccctgaatcagcctagtacatctttgtttagtagtgcagcagattcaaacagcctctccttgcagcctgccctgcagccaatgaacctggagcctcctgcaatatttgaaaagagaagaagacagtggattttctttatgtgtcattttacagactaaaagaggatgaatgtctcatgttggtctggccaggccaatttcataccaacctggcttctcaatggcttccagctctggccttggttgctgagttgtttccaagcacattgctctttgggagtaatctgctgtattgttggtgcaacatccgttttgcataaactgaggcagatagctctggacagcctaacctgtgagatgccaccactgttcatctggtcccctagcccaggccactaccactgcttgtgtaggcagctgtgatggtaggctagaagcctggtgacatttcctcctagcagtcccctccccccttcctggcaagagcatctttcttgcagcaacagtaaggatctgtctaagatgcttttctggtcacattaatttccgtctgaaagcttgccagttgtcccctttgtgcttagaagaaaatctttgtcgtgcaaatccttaggaaaggaaatctacagaaagagaatcttacaggttttacatgacttgcctgacccaggtttttttctgtgttgggttgggtttttttctgtgttgctgctgtgaagttccactcctgggggtcactggatttgtggaagctcccctttccgtctttgtactagttttgcttatctccctccagtttgccctttaagaaaatcactaccagcacggcagattggccattcctgttcatggtgtctgacctgtttctgtactggtttttgtttttgtttttgtttttggttttggttttttttggtctgtttaacagtctatctatctgctatggtttatatctggacagtttcccaaagtcctgtgagtaaaaggcttggcttcttgcccatgatggtactggaggaattgaagccatgtagggtgtgcccttgaagaacattgtgagactctgatgtctgtctctatctctgtctctatctgtcccttcatctacatgtcttgcttgtgccacgatttgagtagcttgtcctatcccaggcccgtgagcactgggtccaattatacacatattgaaaactctaaaacattagaagccttttcttgtataagttgattttctcaaagtgttttggtatagtaagagaaagctgagtagcacactgtgtcttctcatgcatgagagctgtctgggaacaaccacacttggatcttgatttacattcttgtacattatactctaccctcaggtctaagaccacaagaaagacagctctggagatgttgctacaggagaattcatagatggattacccaccctgttgcctccaacccttgcaggatctaaggccatgttcacaggatgccaataatcaagagaccttcagattctgagctttcctggcaggttctgccatgcttcccactggccaagaccaccagtggcaaaattagctctaagcaactcagccagatgtttccatctgcagaagagtattatgcctgcactcatagcagaggaaactttttactcataaacagagcaaatttatagtggaaatcagtgggagggaataaatatgaatccccatgaagtcattttgtgagctgctttatagattgtaatcacccatttagagtttgcaggctattaattttgtttggagagaacctcaggactcttgggggcagaatttataactctgttgtgtcacactcatgggtctaggccttgaacccctgaaaggtttggaaagaaattaacaagctacctctggaggagttggggcttcagcatccttttcctgtggttctcttggacatgggttttaaaaacacacttgcccagtgtatactgtctttgttttgccccagactgtagatttccccctgtgagctgaggctgttaagttttactttcagcaaattgtagtaggaatctgtctttcgagaactgggtgagacctatggaagagcagcctgagtcaagcagatctgggtggactccagctaggctatttgacttaagattccaagataaattcaccgctgttaaatttgttcaaacgtccctttctttataaataagaccagtgccccagcctcaaaagtgataacaaggataaaggagatgaaataggaaaagcacttagtattcaaaatgacttagttcatacagtgacggagctgattggcgattcaaagtaagtctggtagagcaggaacaaaggagaatgtaagagctatgatgctggtccccaactgtgtcgctgatgtggtgggtgaccttggccatcatagcctctctggttccagatcttttgcattagtgaaatgaaatgtttggctcaaattgtctctgagcgaatggtgaggccagtattacctttgggaccagttagagttatagattctaaggctctatcctattccccttggggcagaacgggctccatcttctgcatctggatgagttttccaggtggttgtgggcagactgaagtctgagcgtcatcactgtgatgactcattgtggctatggtattagctctctagttttcctggtagtgtcacttctagagcctctctccttggggtcttggaccaaaacaggaagcgaaacactatgctaaccaagattcagttgaagttgggctcaagagggcttgatattgtgttggagtgtataatctctactttctgatttctcagggggatgacctctgtctccaccttgcctttaaagtgactttagatgaggtaaaaactcatctgtcatttggaatgcacactgacatgtgggccgtaaggacgcttgggggtggggccacatataactattattatatgtgggagatgggctgtctccctcagtatcaaccttagtctcatgataccatttttcttgagactctatgtgaagaggtacaagatgagcagtgaagactcaggcctgtgctctaggaccttgaacaagtccctttaactccagttcccgatgctgcctccttataataggaggatttgcatactttttgctactgagccttttgagtaccaaaactggatcaaattctgagaacagagcagagaaaggcagctgaatcccggctcacatctttaccacttcctctgggcactgtgcttgctgtgggttttgatgagaagatacataagagaagttattgtagctgttagtgatcatcaggttatctactccaagtatattaaggagctaagccttcttggggatttgcgatccactatgccctccaacttgtgcgttcccctatcctgttttgggctataattgtagctgtttttacagtgctgctgtgactcgacccaagctgtctttgcccattgctgcttattctctcccctggccttttttgttttgttttgatttgtttttagtgagacagatgcatacattaggtgtattagggctttgctgaggcagaaggatgcagctacagggggtgggggcaggaatggaagcgagaagcccctttcaagtagtgattgtaccatttgtcttcaggaaaggtggattaaactcttactggataactaactgtacttggctcagcccttgagctgactgcatacaggggaagtctacctgagcaatagggaaggggacgaggcagatcctctgtgaaggtcattgcagagcagtgtgtggactctgctcaccattacggtttggtcattctttccatcataaccttgtggatatctgctcacaatccacatctcaggaaaggtacaaggagggagaaaaaaaatgaggtcttgggtctctattctaggagtttgttttctaagtaaaaataagtcacaggggaaaaacataccgccatttgtaagaggcacagtggaatttagagtttgagatgaacaggcagatggacaggaaatgctgtctcaggtagaataaaggagagattcatggactgggacaaggtctgagaggctagaaacataagcaggtgaattttgtaaaggagaaaagggagaaaagtctcagtgtgaggccactggcagatccataactgtgctccacaaagaggttgacataacttacggcctggtgtacactattttatttatttttaaatcttctgattgatgctctgtagggagtgagtttagtccagagtgaatgtaagtcatttcatgccaaggacgtatgagaaattggtaaagcccagcccctcccccttactctctcttctctatagtgctctcctattgaaaccagtttttcccaccccaccccaccctacacttgctgtacataataagtgtacagaggctctagatgctgtgtagttgttccaccccatcagaatgctcacaacatcaggcccacaaatgtatctgactcaagagcacatctgtatgtgtgtctgtcctgtcttcattctcatgccacaccagcctggtttccaggacccgagttacaaggatggatgcagtacatctgtgtgctcactgagtgattgccctcttcaggatgataggtctaagaaacctaccagccgttaatgatgtccccaccaaggtggcccttgtacgtttcagagcttatctgggtttgggctgtgctaaccttgggctacacagggaccttggaactcccaagtaactgtgtatgtgtatcactggtccctctcccaagttaccatgtagacaccctcccatcaagtgccttgtccttgttgctaatcatcctaccaccccctgactctctttagtctggagacagtttttaactcagacctcagttgttcccaagcctacttggcagttcctacctcttcaacaaaccccaatggaataaactggaagtctttcccaccaagccacccatcttctgtctttacctgtccccccagtaaaactactgactgaatttgagtaacctatttagaagataaatgtatcctgaacacggttctgctccctgctacagagtctctatgtatatcagctagtcttcatcttggagcaaatgttaactaggtttaagtattgactcactcacgggccactgacaatcaagagggggcagctttcaactgctgggtggacttaaggcaaattctaatggattttccccatctacctctaaagtctccacttgtaagtttactatcataacactcacccctagtcctcattcacacagaagatgcatcttctaaaaccaaaggtcttcctcccattggctctcataatgatctatgcttcatggcctagggactcactgctactgagctctgaggaaccaggttaaagaagcatgtggatactggtgccagaccctgtaaaatatgtgtgttgactcttttttggtatatgacagatgtcaaggtatactctgtcacttctcagagtccctggttgagaaagacaactgcagggtgaagatgatggccttgctatttctcagtctcatttttcctcctactggccctttcctgtttacacattttatcttcctgggcaggaaaatcggagagttgcctaagaaagccttggtctatcagtatgccccattgctgcttagtgttggtttttggcatcattcatttgggacaagtagtgatgatatgacagaagatgaccgtctggtctctagtgtcaaagatcatatccaaaattggcaaatcaagtaatttaacgtaaaaactgacactgctcagtgcaatggggtgggggtcggagctggcaaggcacacatcacagtctttcatcctccatctcactgttgatgaaaaccaaagagatacacagtgattgaaagcagggatgctggacaatcatttcattggctcaaactctgtttgtgaccagggcccagggatttgcttttctaatggttccagtgtatactggtgcagatgctgtttaggttacaggagtgagggactgggcttgcactgcctgcctttggtccccgttggaaagttacagaaatccagggaagcaggggtttggaccaactgactttgcttgtgggtgcttttaggatgaaggttgggttggggaagtggatagtatattaggtagatgtctttggggggtcctctccattgaagaaccaccttcacttggcttcagtatgtactaggagacaaagctgctcaagagaagggaaccccaaagaatgagagaagatgtaggcctaccctagaggggtgaaaaacaggatagtctaaaaaaggtacccagcatagccttgagagatagggctagcgtacactttgatcgtaaaagaaagaacaggccggtctgcccaggtttttcaacaccctcagaactgaactcctatgtttgcaacagagtattatttatttccatctgaaaaaaaaaatgaagaaagtgaggagttaagtaatatgcacaatatgtgtgttgggggaaagaaaaattcagagacacaaccctcctcagatctagattgacaaacgcagaaaagttggtaaagaggggcttagaaaccagaggtcatagggaaaactacccaggtcttttctgtgctaacattatgggctgaaaggatgtctggataatatctccgcctcccacttccttgagaagacagttaaatgagctaacacttgggaaggacccacctattactggcaagcatatggtgcacccttcagacttaatcacctttctctatttgactctgcaacatgcttcccatgctggtgaggcaggatgagagttggtcatcctttgtcttaattggcatggggtagccaccaggcttcctaaactttcctagattgggctttcagatggactgaagacattaaggtgttgtgagctgccccattaccatgatttaaaaggatctcaatgcctcccatttctttcttactggattgccaatttctcagagaattaaacatttagtgcccaataagatattttcctatgctgaacacacatagaaatgtatgcttaaaccccaggggctccgttagagtacactccaagcctactcctgctcattttctgatggaggtggtgtcttggtggttggtgagaggaaagataatggctgaagtgtttctctgaaagtggaagatggagagaagcagagtctgttgtaaggaggaaggttaaaattgggcgcaggaggaaacataagccctccgagctgattgggtttacctagacacaatttacagagccttggaagaaattcattcctgacagtgattgccatccttcaccacttcttatggaatcagactcgcacttgaaagttctctcttcttctcagcatggctgcttgagagaatcgggtcatttgtaagtcaaaatttccgcagaatttaaaataggtaaatttgcaggtatggaactttaactggctgagaggatgggctcaattgaaggcagagttcctcatttcctggccgagtattgcctttgagggcttctcatctcacagcaacaaaggtgcagtggacagaggatgaaccttccattaatataagtcagtgaagtcttgattctctcagaattcacaccggatgcggccatctttgtgttatctgtgggttgtctgggaattcagacttacagtcttactggaaatacattgtaaattccagtttccagggccactaagtgaattgggatcccaccccgacccaatggccaaccagtaagctccccagtatcatggtgttatgagccagccggggctgtgagtcagcaggacttggacaaggatctcagaagtttcatctctagcagtcaggacagaaaggatgtgctggcttgcaagatacctctgctcccatgcctgtctgtagagagtcagctgtgaaagtctttatggtggcaggttttgtgagctttgaatctgttactgatgacaaggagacagtaattgaaagatcatgccctcttcatttaagaatgccttgattagtaagatgcactagcaacttaatacctgcgttttgggcaagattggggtgagagtacatgctattaaatatatattaaaatatgcagagtgtgaactagactgcaatttcacaatcactgtatattggaaaatgtgtgactcttcgaattgagtttaactacataatgatatggtgcttcacataaattagctcatttaatcttcacgacacctctacctgtgaacaggtgccccagtcttcccattttactggagagagaatcgaggcttacagacgtattgcataactcttccaaatgcacgacagtccagtgctgccagtcagggggtgagagcaggattagaagttttgttttcgaatgcacctcagacactctattgaaagccaaggccagactttcttccacttccttccttctcattgtctcttaatcagggttctgggacctctgaatggcaacagatagcacaaatgccaacacagtgcactgcaaggagacacctgacttggggagtatctaagaatgaaattgaacattagaccccctcacttgccccgagattctgggactgtgttctttgatactgtaaaggctgagcatgagacatacatacagcgagtgaccaagccaaggagagggctccggacaccaagcaggggccacttattcagtttgttttcatgtgtctgagtgttttcttgagtgtgtgtaggggtaccacaatgggcctggtacctgtagagatcaggatggggaattgtctcccctggtcctgatgttgtagacaattgtgagctgccatgtgagtgctgggaatggagcctgagctctctgtaagagcagcaaaagcttttaactcctgagacatctctttagcctcctacttctcagtggttgtatgtgtacatgtgtgtatgtgtgtgtctatgtgtatgtttgtacctgtatgtgtatatatttgtgtgtgtatgtgtgtatatttgtgtgtgtgtgtgtagttgaagacaaccatgagtgtcctttttctctggtaccatatgtatcattttgagacagagcttctccttggtttgaagcttgtcaattagggtagattgtctggacataaagcaccaggccctgatctatctctgcttctccagtgctgggatcacaaacatgtgtgcacccacctgtattgtttgtgtgtgcttctagacacaaatccacatcctcatgcacacactgcaagcactactctctctctctctctctctctctctctctctctctctctctctctctctctctctctcatctccaggaattctttttccttgttgcatacagcttttgaaaaaagaatctttttattggagctgctcgttgctaggggtaagggagaaggcctgggagagctttccagttcagagctctcagtgctgatttgagtctacaagctcagtggaagcagaccagggtggggagactactgagtcctcccatagcgagacccgcctgagtttttgagctagcccctctagcacagacctgctcatctggtctggacctctgcattctacagtgctccccacctccccaagtcttgagctccttgtgaggaagggaaacagaggcgcttactcactgcattccagaacaatccgggtaatggaaagtacaaaaacaacttaaacttgtttccaaagctacatgagttatgccgacttctcagaaattgtccatttggacccaaaaagtgaaataccattttgaggctcactggagaggagtccaaaggtgacacagctgcaagctctgggcagatgagaaacacagatgctgcaattagccacctcagtgagtcaaagcagcaggcacagtggaattccctcccccaccccaaacacacacacacacacacacacacacacacacacacacacacacacacacacacacacaagtgctttaaaacaggagctctttggggactttaagaataaagggttaacaactcctgcagcatggggctggtgttaaaagcatgagatttttaaaacaggggtggggagaataaatggtagcaataaggcagagaaggggtatccctgagtttgatcacagctccctgcatcttgtcacagtttaaaaattcctgtattttagcacacagtcacaatggcaatactaagcctgctttaaaataacctactggctgtcctatgcaggaaggccaacgtagagctggaactaataaaagtgtgtgtgtgtgtgtgtgtgtgtgtatgtgtgtgtgtgagtgtgtgtactcccaaagtggagaggaccaggtaatgatttggggtgcaaatgtgcaaattccctgggtgctgctaggttaggtgtgcaggaaaatctttgcccaggccagtctctgccttagctatgcagtctcttccccttctcccatataaagtggggcacctagtttggttgtgagttcaagaccattgagagatggacacagaaaagagtgctgaggggtttgttggctctttgtcaaggaatgacagagctcaaattggatgcacttaggacagttgttgttctggcctataactcagtaggtatgtgatttattaacatgtatgcatctggtcaaacacccttcctgattatagtaagtttgcaatagagtgctacccttcatttcaataagctcttcagaaccctggtggtcagacaggactctggaagtattcatggacattcttctctttgttgacaagtgatctctagtttagcaggacacactaggttatagttagcataattaatgagtctactttgggtgcaacaggccaattttcaggtttattagcttctagagcttaccatatgaagaagagcctggctaaaaacccattgggatgaatactaatcactgcctctgagttcaccatcccatttgctgttggtgcaggactcctgtgtgcattggtgtgagggtcagcccacacagagatgtcttcacttgggtgtccctcatggaatgtgcgtaggagaaatgaagcagtcagtgtcacataccttcccttctctcctggttctgttcatatcttgggactaaagaagctcaggtagaggatagcatctgggcagaagaggatgtgccttgttgttcccagtctgtcttcacataggtacaggctgtctcatttctcccatctgctttaaagagcaagcagattaatgaggagtgtacttagagccttggtagccttgcctccagatatgtgtgtagcatctcgcagtttacaaactaggttcccaaactaatctcttttgacttaatgagacagtgattcaactggttataaatcagcaaagcagtgctatgcaccgtgcatgacaaccacagagccagagcgaagctgtcactcgaatgaaaggaagcgataaagacttgtgttccccagcaggagaaagaaaacagcagttaagttttcattcaggatctggtatcagcctttagtgttttaacatgctcctattgaaagtgcctgagaatgcttactgtaccctgcaggtgaaatgccagggctctggactgtgtggggtttggtgaggtgttgccacttggtgagtctgtgttcttacagcatgagagagttgcactgagtcctggctttgctgtactctggagaacaccaggaggctcttgttctttacctccttactcacagatattccagaattccagctgggcctccttcacaaagatgaggtcttcagcctttacaagtggggtgattggaatcttgtggcttctgctggaaactcctggatgctgagagaggaaagcacagagagagctttgttcttgttcacatcccatacttgtctctgccggtctaaaccccaccatcatgtaggtaggaaggcctctcatctctttcctctatagcaccatgtcacctgcttgacatgtgggactaacacacgatctaggcaggcaagccattctgctgtgtgcagagccatggtgctgaattccataccacagctgacagggatgacaaactcttctccctttatccagccacaggtgaggcctgctgctcatcaggttctcccagagttacggtaccatagaaagtctgcacagtcagtcaggaggttggggacttgccactgaggcaggcccaactgaacgtccccctcttgtcatgtgaaataggctgcttccaaaggggtgcttcaccgttagcacccagcctgtgctataagatatcactaggagctctgtaacttacaacacaaactcagtttgtagcgttggagtcagaatcctcccagcagtctctgggcgattccaggaatctgtttcctcacatttcctggctctcagagaccacctgcaattttgtccttagcatctttctgtgtcactctgacctctgatcctgccatcttgctgccttttctgactttaaaccacatgcctccttctcaaataggccctgctattcagctctctcggatcctccagaatggccccctctacccccaaactgaagatgcttagcttaattttccagcagagactctttgccataaattgtagcagtcacttgcaaaagaaccttgttgaagtggtttgtattagttcataaatggagcagcctctctctccgctgtgaaatagaccatgctcaactgagccaggtagccaaagtggactcctactcagagaaggactcaaaagagtagaggggaaaacagaagctgatgggttggttctgtaacagctgccttctctgtatggttaaaagcatccgagactttttgatcattatggctcaaatggactgggcctcctctgattagcatctgtcaatctcctgggtttttgtttgtttgacacagaccccacattcaaattcatttgatttatgatgtctgcaaggagtggtccattcctctctgctttgcttagccttgttttccagaaagtctgtttagtagctgcttggtgtcttggggcacttggctcactgttttaaataacgggttttaagagatgagggatgtgcttatatgaatggaaaagaaactgttgaatagctaaaaataccattttatcttatttctagggctgcatgcatgtcctgtttcctggaggttaaaactgttaagaatttgaggtattctcaatggagggcatgcacagacaagcttatgactcacatgtacatgcatttatatatttgcatagatttttcattttaaaaacaaatgataatttggagctggagagatggctgaattgttaagagtatttgctgctcctgctgggatctgggtttagttcccagcattaatatgctaacttacaagtatctgtaactacagttcctgtggctccagcatcttcttctcgcctctgtaggcactaggcatacatacaataggcttatatgcatacattcatgagattcatacacataaaataaaaacaaatcatttataaaacccacaaatgatagcttgttttgctcctgctgtatctcccggtgacctgttgggaccagggtcagtgtacccactcgtgccaacatctatgcaatcttagcttcagtattctgggatgcaagagtccatttactggtggtagagttgtgtccagacaaattcatcacatataagaaatatgaaagacaaaaaatgcagttaacatacgtgttactgaccatcatggttcatctacacaacacactatagtgtgtttccctttgtcattggtagaggatgagtgattgcgacttggatgttctgtccagcattgtgagaaaatattcctcatatagatctcatatgctagggatagagccaggttcagagtttgatggctggttctggcaaatgggataaatatagctttagcatctgagaaatgcaaccagagtcatagaaactcgggacatttgtgtatgtagctggctcttataagctttaattaaatgccatttctaacctctagctgttcttaacagcacagtcttcttttatttgtcttgacatatacatgtcactgtatgtgacatgtatgtgacatatacatgtcactgtatgtgtgggaaaatgctcaggggcatcattggatcccagactatgttggtatcatgctttttcttctctatttctgtgtgcgcatgtgtgcacctgcgtaagtccatatgtgtgcacatgtgagtgtgcatccttgtgtagttgtatgtatacatttctgcatgtgtgtgggtatatgtgtgtgttttggggtgcatgtgcatgagggtgcatatgcatacagaggcccaaggttgctattagaaattatctttactatctatttcctttatttaattaagcagacttcctcagtcaaacccagaacttgtccatatggtcagtttcactcacttgctttctctgtggattatctgcctcttcctcctgaggctaggattataaacaggctgccactgctgcccatcagttattgggttctagagatcttgactccagtcctcaggcatgtgctgtaaatgcttccgttattgagccatctccccaactcctaaatgatacactttggtggcagtttctaccttcatgccttattcagcagtgtccagtataccagtcactgattgtccccaggcatcttgtcatatatcagacttagctactttgccttctaggaactagctaacagctggaggtatagaactagggttgcaggtaaccctactgggttagccactgcagacccataaccagagttgcaactaagacctgtacattgactaacattcattagattgtaggtcccaagatactatgtcacaggctaggaacactcaccataccatgtttctttgtctctctgagtcacagaatgggacaggacagagacttggattgaagcattgtggtggtggcactgtgctgggtcagatagacctaacagaggtattccattggcagggagattgcagccatgtttgctggggccagactgcttctatgtgacacagctattgtttgtgaaagagatttgatgcttcattagagaaaagttgtgtacagaaccctggcagagatatcttaacagccttctgattaaaggtgcaaacaaggcaagtgccagatgagctgcatctctggaaagaaggctctacagagagcatattactatttttttctctccttccttatatggcagcatacatttgttacttagaaaacaggagaaagggcctgggtgatgtagcaaagtaggtgtagaaagcagagtaaaatctgaagctgtgcatctctctagtggcctggcaggatatgttgaggtttctttgtagaatatatttgactctcagtctggagcacacagtatgttgcctcacaatgcaaggctttgctggtgtatgagtctgcttgacaagaagcccatagagtactagctggccctggaaagttcaaggccaccatgcacacaaatagttaccactctttttctttgacttcgggactttattaccactgatataatctcataaaaccatacctcaaaagctgttgcttatcgtcttggtctctgtatatggtaatgaggaggtgggttagttctctcctgagtaaggtgattgccctgaacctgggagagtaggactgaaaacctttgtctatggacaaagaagaaaactcactatacgctgatcaaagtgatatttgaagatttcaatgaagggctggtgcatagttcagtcagtaaaacttagtaagcttgcttagtaagcatactggatgtggtggtatgagattataatctcagccctggggaggtggagacagaagggttcctggggctcagtagccagtcagtaaagtccagcccaagagaagaatctgtttcaaaggaggtgaccggcgttcctgaggatggcacctgagataatctggtacacatagacacacatatgaaaagtgtcagttagatgtggcctggtagaccaggcctataatcatagctgctaaggaggttgaggcaggaagatcacaagcttagtgcctgcatggaatgcagtctgttcaaggtcagcagcataatgaggccctcattcaaataaaattaaaaggctaggattaaaactcaggaataaagtgattacctaatatccacaagactctaatattataagtccaaaaagactcaaacgtcagtcaagtcaatggtaaattcctgatgtcctgccatattttaaccccgccctagtatcccatttcattaacacactgcttagcttctcattgcctgtgcccccccccctcgtgttggctggcttacaggttagctctgcctggggacctggggtcctgctgcattgtaatgctcaagccctggcctgccgtatgtgaattccattgtggtctccgatttcagccatctgggatgtcccctagtcatgaaacaacttgtccctccccactgttcatgtgaccagagtactgatttccttcatatcctcattgtctgtagttccaagaaactattgcttgcttatttgctttcttcatcatctgtcacatttttgtacaagtgtcagtttcagaaggtagggatctggttggatttatttagtacctatagaactcaggttccagctagtaaaaccaggcagttccagagagagactgtcagaggagagctaggcaaccttgcttaggaggagtaaaaacccaaataggacaccataagtcttattaggagaagggctggagctcaaatttcagaaatgggggtggggtggattctggaagagaccaattactgccaaaaaagggagagaggtaggctgcctcaagctcttccctttcttttgggggccaccaccactgactgaaccaaagtgaacagttggcaagagtacctcagaaacagctcttgtggtttaaactctcaagtcaagagccagatcaggtggtaggggaccagtatgaggaccgtctaatgactggaacttcatctccagcttcactcacagtcactggaaaacaatagttctgagaaagtaagaggtttgatttttattattcaagacaatgtctcatatacacagactgatctttaactctctatggaaccaaagatgaccttaaactacttccatcccttgtgtgctgggattataggcatggaccaccacacttttatgtggttccaaaagtcatatccagtgccttcttgcatgtgccaggcaagtgcgctaccaactcagctgcattctgacatccttagtgagcaaccacagaatggatgaagacatgggacacacctgctctgagtcaattccaatgtcagctcttacaaaggacccacactatctcaacagtgacactccagacacaaccccctgcccccaagttctgagtgtcaggttctgtagtaacatgcttttgagctagccggctgagagcttagtgtacctcctggctcttcttcccggaggagagagaaggagtcttatttctggaaatactgctgtgtcatgagctctttcatccgatctcagtgatgcttttatatgagcaggattgtgttccttaagggattcctttgaagacagttttaaacttgcattccttggttcagtttcaaaatttgcaacatttgggaatcttccaaaagcccaggattttatatccttgaagtcagggtgttaagggaggaaggcaactgggaatgaaccccaatccatgtttctagacattcttatctgggggctccaagataagaataaagaataagaagccacatacaggcttctggacttattcataaggtggaaataagagcaccgagccttcagtgtgaaatgaatgaaaacacctaagcaaagcgaaagcacattgattgatgcacttgaaagtggtcattctttgcccccaaatcaccagaaaaaaggtcaggggccccacccctaggtaccaatagtatctcaccccgttctctgcatgtgtggtggctcacttttggctgatgctccttcatgatgcccttgattggagtaaaggagactgctgacattttcggatatagctctttcatctggtgacactttgcccctctaaaggagcaaatgcagattttcccgtgaattttcccataaggcttgtttgcattaaaaaaaaaaaccctgttatctgcttcaatgtcatttatagaaaatgtacttttcttttttcctcttcaaccctttatactatggtacatatattgggtacctacacagggagctttgcatataagggttgaacattgagaagtgatagtttttcctgtttaaatgttaggtttcattggtgctctatcaaagctttgtaagtaccatttattatcgggaatctcagcaggttagagcccagagacttcaatggaaacctctaatggcacaatgacaccagcctgtaattaaggcatttcttgggaagtaattcaattgagttatagaagtgaaggtaacagcctgtgggactggaggtaaaattaggagcaatgaatgtgattgaaaggcaagaggaatgttcctggctggagttgtgtgtgtgtgtgtgtgtgtgtgtgtgtgtgtgtgtgtgtgtgtgtactcgaatgtgcatgtgtgtacatgtgcatgcatgtgtgtgcatgctccgatgagtgtccctgagttcttgtccacattattaatatgacagtggggtaggtgaaggactccttttaaagaatgccgtgtgtctggcagatatgctgtgtattgaatctctagacctttctatcagctgtcctggacagcctcaggagacactggtgagaaaagcgatacacctttcaagtcagttaaactctcccctgcagatcccaggaccacgttcaatcaagcttaggatggcacccccttctcggtctttcaaaaggactggttgagtatctttgttccctgcatcttcaaaggcagagccattgagccattcttcagaggcaccaacagagccaccggaaagtggaatttcccacaagaccacagtctcatcaggcttcactcatgaccttagtccttgcagttttgaaggacaaatttgtcctatttagagagttggtggaaaatagccgatgctcaactgtgggcctttgcacttgaataactgcattggaataaatgtataggaagatgtaatcttcttttagaggcccctttccatatgcacagatactaaggttcaagggcagtggctgtctggccagagagtgggtagtacagaccttgggctgtttgtccttgaataggaaggtacagactaatctgacttcttgtggcctcactaccacacctctgccctcctccatgccctttgcattttaaaaccactttactatgtcattgcatctaacctctacctcggctgcatccctttaaaaccctgaatatctcatccatagtgttctaaatgttaagtaattttaaaaacaccaacaagagcagagagctcatttatgggctttttaagtgttttcatttttttttttttaaattgttaagcagtcaagagtgacttgtgggatttttctttattttttgtttgtttgtttagtaagccagtttgtgtcatttagcatatctgtgtgtgctcatggcctccaccatgatcagcatgtaatcgttgaatgctccctctaccctccagactctaatctctggcaaccatacaccactatagttttgtcttttagagaatttcagtagaatgttgttgcatgcctgaagtactagcacccagggtctcggaattgtggctttgagggcagcttggcgacataatggtagttaatatttgttcaataaaatgaacacgtagaaactccaaaggtcaaataactagaggtcataatatgtgaccctttgaggctagcttcttctatgggtatttgtttgtattttgggtgctaaaatccatgcttaagagaatcagtaaaatttatccacctggtggcagaaattggaaaagatgtactagaatacttgctgggcactgggcacagtgggcatggggggattaagggagtgggagaaaacccaagtcccaccagagttccggtgctctgggcaggcagatgcaggagtactgccggccacatgctttccacacagccccaggtgggtgtctggctgtgggaagctatggacccagcccgcgggggctggacaaggggcggtccaaggtctctgggcctcacggaggccagagataacaggttctcggtctcagtctcgagcatcccagacaccgctggacaccgcggaagagctgagaacaaaatgggggccccgggggtggctcagtcattcccagggatgaagggaggagagggggtgctgggtggttcccacgtgggcgagagtccttggtctggtccatggctggagtgcaggaaggccttctggctcatggctctttagtggaaagcctatcccatcgttcaagtgtggcatgccttgatgaacagagacagtcaatggttttagggctttattgtatatagaaagacagagagaaagaaagagagaggccaaccatggccatgtggagagagggaggaagggagagagagaaggagagctagagatgagagtattgagatcttaaagagcgagaagaagccaagcagccccttttatactgggctggactactttgctgttgccaggtaactgtagggaggcgcatacctagctttagtcagataactatgggggtggggtctagccagaatgcctggagcttggggctttatctatgtgacttatagtcacagaattatggagttgggggctctgtggtgtcaggcaccagtctctggggacatggctcactgttccatcccttgtagagtttcctactgggtctccggaacaagcctcattcaaccaaaacaggctgcttttcacggccccacaaatattcatgttgggccacgtgttttattgtgaagaaaaatgtttatgtgatatgtgttttaaagattttatgtaaagtcccttctatttatactctcaaactgtgtctgctagttctgttccatgtcgaaatagcatacattaaactataacaaagggagccttgaaaattctctagatcaagccttggttagatttgctgtttctacatttagaacagtagacatcctttgaggtcctgtgtattgggtcattgtttgttgtttttctcaagcttaggaaagtttggatggcttcttaaatgacaccttttctccctccaagacttgactcttagatcttcctttatttctgtcctagatactgacacctagtggtccctggtaactttgccactgcccagtcttacctgagtacagttggccgacttatacacacagggaggccagctggggttccagatgtctgttgataatcagcatttggaactccgtgatgcttgctggaacctggacatcctctcacactttcagggcatctcagcctttgggagaatagagctatctgcattagtataggagacagattggcttgaggtggaaacagacctgtttcagtgagcttcgtctgccacagaggtaattgggagaacagatctggggatctctgtctgacagccaccagaaggcctcccagggagctggaagagataaatctgtcacctcatttcctgctgcttcaggtttagggctgtcactgctgccaagcatggatttggttctcttccctacccccccccccaaagaaaaaaagaatgggtaactggttctttctcaaagcatggaggagtcattgactccaaggctatgtccaggaatggacacatgtcacttcatctttgactaacagtaatcatcctatactcattattgagatacaaactcaaatgtattatgaaactgtatttctttgcctctctagaaagcttgttgtacagtcagaatagccctttgtttaaagcttcagattatcttttgttggttagtcaatgtactacaacaagtagttgttccgagtcactcttttaattgtgcatgtacacacacacacacacacacacacacacacacacacacgtatactcataaacatctgtgatattgtatatatatgtgtgtgtgtgtgtgtatggaagccagaagcttatgtcaagtgtcttcctcagtcactctctgtcttaatctttgagacagtctcttcactgtacctgaaactcaccaactcggctaactggctgaccagtgagttctgaagatatccctatctctaactgccatgcctggctcttatgttgcttctgggaacttgaattcagggcttcatgcttctgtggcaagcactttatcaactgaaccatattttcatgatgtcctattgagtatcactagattctgagggtgcacttgttggagagcatttctagacactcgtcaagatatctgcttgactaatgtgactgggtgaatcttggctccattgccaaccttcctgagtgctgccctccctgatttgttaaatgggaataacaatcatatgtcccccatttggcttactataagatcaaatgagtcgacaaatgtacatcaggcaacgagccaataccagacctttcttagaagctaacttgggagactccagatttgaccacaactactatgttgtcctgttcaggttgagaactgatggacattggagggaggatgtctgtaggataaaaagtgaggtctgtgaaagctaagcgatatgcccagaggtctctaggcctggagtattcccttgattccttacctgtttcttcatactgcagagcaggccgattagcttcatggaccatcttctcttggacactctgttgactttacagtctttattaacttgaactctcctgccttgccccgacaacagtaattacatgtttgatcaacacaaccacagattgctagagagaaacattgcttgtttttagatggagtttgtgcgttgaccatatttctgctgtgttcatttatctgcatgatacccctgtcttcagaagagacattctcttaactggaccacatgttttgcaggagctatccattgcccagtgggggagtgataacagacttctttgttacttggtcactggccagttcatccaagccattttgttttcccctgttgggcctttctgtcaaattgtccccatgactaacaacctggcttagtggtgacaagtttgttaatagagagctgaagataaggcagtggtgactccctttgctttgagagcttgctgcccacacaatgagtgatccaaggacctgtcatccatttgagccaacacatgcgaggtgctagaagatgagaggactgagagcctcctgcttttgtacgtgtgctgggctcggtgcccccgccccaggaaacctctgactccttgcatattatcctcttgttgactctgtctaggaaaaaatgtgattcagtgatatatttttgtgtatgctcagaggacattttgagttttgccttttgctcagtccacaggccaggtaaggatttccatttgtccatatgaatcaactgctgtccaactgagcatctgaaattggtttctcctgtcacctatcgccttcctggactaggcattgtcacatgcttttgctagggcagatatgacaggtagaggaggtggggtgggattcagttagcgccagtgcctctgtggataggtagcctacactgacttggcacaaagctccattaatatgaggaatgttcttggggtgtatacattctgcttctaagtaacccgtgaaagacactcatctctttgtgtgcacgtgtaggggagattctggattcacagggttccagaacatctcccttcatctttgtttccaatcattttactggagcagtgcaaagcccaagcatgagtaaatgggtgtggtgctgtgtgattcagatctgcagagcaggctgattttgatgcagaccgtgaccctccccctgtctacctcggggatggggatggggacagggacggggacactcctttaaaatgaatatggcatttgcacaggatgaaggccagagcacagaatgaaatgtgactacctgtctttactaacccttaggcagtggtgttgctcatctagggtgtttaaagaacacgtgcatgcatttataaacagagatggaaagtgtgagatgctatgttggaaacctaatgtcacaggggtggtctgggaaaggaagcctggagcctgagttaccctcaagtgcacaccattcaccattaaactggcaaagattcactgacaaactagtaacattgggacttgtggctggtgggaattataagcaggtgaactccgtggattccagtgtctcactctgtagtttcagaagtgaatgaattgggagccttccttacagatgtttcaggagtattcttgagtatctagaactgcaatggaagccactcaaggtgacactatggaaggttaccaggggcatgtggcatgatttgcggtggtgccctgacctagagtttgatgacaccatcttatgtgatgagaagcttgtgtctctatttgaattttcctgactacaggggcatagttgccttgaaggtctacaagtcattactgtctttctcaacatggagaatcagcctcaagcccaaggctctgtgtcttgatgaggctacagtctagagatagaatcttactgatttgagttttcttcactgctgtatatttggggttattctccagttatagcaagcaagatgacctgtctatctgatagcaatagaaaattccactcaaaacaaaattagaaggaaaatattctccatgattaagtgtgcgggaagaaactcattgtaagtgtgttttcggggtaggaggtgtgtgacatctggtaggaggccatgatggtcatgagattttagggggataagagctgatttctccctcaagctgtgagcctcaacaactaactgtccccagtagggcacatttctaagtaagcactttgtatgcatcttgtttaatcattgggcaagcacaatgagatgtatattgtaccagtcaccttattttcaaggtaaacttacttttccaatgtcacatgaccattgaggaacagaaccagtgtgtactcacaagcaatgtgagctctcatcctggcactcctctgtcaccaggacatagggcagaagctgctgggaagtgtgctaagagaagacccaagccactccagcttgtttccattggcaacttgagagagtagtgagggaaaagaacaaaactgtgttaaaggaaagagggccgtggagctagatcatttggcaagcaaatgcttgtcttccaagtatgataacctgagtcaaatccccagaacccacataaaaaatgttggctgtgatgccatacactcccccaccccagtgctgagaaggtagagatgggaagatccctgagactcactggtcaccctaattggctaatgaaagaggtacaaagtgttcctgaagccatttctacatgcaggtgctcatgcttacacacacacacacacacacacacacacacacacacacacacacacggaaaattgtcctgtaagcatgcatgtgcacatatttttttttaacaagaagaaagaaaaagcttcacaccaccttatactcaggtgattgagcccaagaccaatccctgagtgacatccgattcttatctccatgtcagtgttccctccctcctccctgcctattgaaaaatcagtccattccctggaatcctcagtgaactcattacatggagatgaaattttattactctctcctgcacagtctgtatacctagagcccctgggcttggaaaacagttggctcaggtatgcatcaacatttatctgttgataggaatgctttttttttttaatcaaccatgttctcccctattcactatgttgtagattgtagaatatatacttcctatgaatacactcatattcagctaagccaaatgtatttattccttaatttaaaaactttactgagttaattccaagacagtcagattattacttaaattggtggatcttattaaacctctgagaacataattaactcattcattctacaagttgttaaagcatcctgaaattcatgataaatgaggccacttaaaaccaattcatgagacagcaggaacatattcggtatgccatgcctattctctgatagtgtgagaaataaatcaatgtttatcatgagctattataattctaatttaaggattctttagaaggcaattacagatggttgtgggaaaataatgcaggtatttcattcaatttttcccctagcataacagtatctcctgaaggtttcagaactgtgcccagtctttcagataaaagtttgggttggttctgctttaattttagcatcataatattcttgtgtcaagcttagcccattttaaggaatgactaactaaggctgtagagctggcttcaaaattaagagcacttgtagcccttagagaggaccaggttttggttctttgcacacataggtggctcacaagcaaacatctgtaactgaagaagggagaacccgatgccctcttctggtctctgtgggaactacatgcatgtgtgtgtcatgatgtacacattcagcaaaaataccctcatgtcccctctttcttctgatcatgtctgaagatcaagcactatttgcaagccactaggaatctttttggttttctccggccctgtgaatcatgtttcctcttattatgtgggctctggtcatgctgtcttttgtccaaatttctaatatactctattttttttttctacactaggtttggcatgcactgttctttgtgtttgtgtctgctgttccctctttctcccatctttctctttgcttggcccccagttcacacatttcacctacccagcacttgccagtcagctactctgacttctccctcattaccaactctgctatcggtctgttctgctccacacttctttcttatttgggttcagacttacactggggtggttattgagtgaatctctagttccctcattataataagttcccccaaagtagctattattgatttccttgttacagctttatccctggtacctttcttaggatccagcacacaagaaagattcacgtatttgtgaaacactaagggttaaggattctcttgagtgtgtcatggctgtcttctccaatgtgaaggatccttctctcaaacatcttccttgaattcttagccaaattacctctgcttttgagtatgagtgtgtctgtacaaccagtatataaagaatctctggaatgtgcttgactttctcaggaacctgaaagagaatggtgtccttgtcaagctgtcatgcccagcaggcaccatattggttaatagtggggccactgaggtttcttgttggcagaaaattgttggctgctggctgaaatggaaatgagtccccatttgcttccccttcttgtccattgagagtcacgtggcttaaagttctaagcagacaattttgggactggtggaagagaaaatatgtgtgttttatggaatatattaggtcaaggagaaagatgggcatctatgggtggcagagactgggtaggcatatactcatctttttccatccatccatcatcaaaacttagaaaatagaaccaacaaactagaaaaaggctgggctttatatttatatgaggcctgtgtgttccaaagtttccaagttttccactatgatttcttccagaaaggagctgtggtcatcactggtctgacctggaaattgggatgctcatctttctagactaaagaatgtatttagcttcagggacttaatgatggtgccatgtatattttttagttacccattagctttgttgatacaggctggaggttgatcaggaccccgccaaggcagaacagatagatacacagctatctcatagaagaagcatcctcgtgttcttcaccacacctagtctacaaataatcccttatctgtttaaccacaggaacttgagcaccgtgatagctagtgagcctattcccagacctgttctcttacgaccttgtacattaaagaggaataggatgtaaggtaatgggggaggaggaggggaatgggaagaaaggctaagtggtagtaattgaaaataagagtgcagtaagggcttaaaaacagaacaaggggcttccctgcctgctcacctgtgccagggtctctccttgggtactggcaatatagttttggatgccctttcaactgtttctatagacatactcactctgaatatctattgtagatgaaatacatcctcagtacatattatagagtatgtactctcccgtgtctggcttttttcttgtagtgtgatttttcagtctatctgcactatagcaagtattagtacttcatttctttgtgttgcccctcagatactcatgcatatccatgtgcctgtgtgtgtgtgtgtgtgtgtgtgtgtgtgtgtgtgtgtgtgtatgtgtatgcacctggaactacctgcttatatacagcagccagaagaaaacatcaggtgacctgttttcttactcactctctcccttatttccttgagacagggcctctacctgaactcagagctcaccattttggctaggcctcctggccaacaagttccgtgtgtctggaatcttcctggcttcacccccagtgctgaagctacaggcaggttatcaactcccttttttaagtacacccaggggtcaaacccaggctcccatgtttgcatggcatatgcattatttacccattgaacagtctccactactcatatactcttgaccctttaaaaagtgtatatggtttcagagtggtcaacatagtctgacattcgtcagtattgtgccttaccgattctctcttgaccctttgaacagtagctgtctctggccaagtgtttttgttatatttctggattctgagtattctatccaaccctactatgtaggattgtatacagttaaacagtgcacaaacatgccaagctaaagacacaagagaggaagggacacaaataccaagtggtaggtaacagagagggactgccttccatctgaaggctaggcataaggcttcatgatggcttgtggcagtcctctgagtggcagccttgccaagcctctggcatggtaaggtcttgagtacaattaacaggtcttttgtttgaatgaagatggaggtggtgacaaattagaagaccaagttagagatagtctctaacctatggagtagatgaggggacacttgcagagttcacactcagagagttatatatctatgcaagcaaggagagttttcaacctctctgtttcttccaacttctatctgagttccaacatctcttgctgctcccacccacatttccaactttggagcatttctgaggtttcattgatgttaaaaaaatatttttcacaaaagggtcaaatcaccagctctagatagcaaagtcaacagatgataaaggttttatcctgttgcttggtcaatgggaaaaccaggaagatatcataattggttaaaaagaacagacatgtagatagattaggaatattgaagtggattggagggaggggaaactgtccctgtaccagcagatgtagtagtggtcaccagaaccactcctgaacagggcagaatttccaagtctataaatagaaattatttgaggtgctatgatctatctctgatacatagatgtgtgaaatgacttctataaagtaagaatcacatagacagaggggtatgacctggcatcttccatggtctcctttctatagcatcatgtgtttctaggagtgagtgacaggtcatacctccagcaaattgggaaacccaggtatccctgttgttccagttgggatactggatatggaagaatttggaaaaaatttaaagggactatagttggtgggattttgaatgaagtagctggcaaatcaatatctggtggaaaacatctcgattttactccatttttataaaagatgttgtaaatttatgtatatgagtttttttcagtatgtttgcatgtgcacccatagaggccagaagagggcatcaaatctagtggcactggactaacagaaagttgtaacctaccatatgggtgctggaaactgaaccctagttctctgtaaaaagagcaagtgcttgtaactgctgtaccatctctctagcccctggactttattctttaatcaccctggcatttcttttacgagctttgggctttctatttatctctttacctctctgagtcagtaaaatacatattttaaatattatttgtaaagttcatttgaggctccctggtgaaaggtaccagttaacagctaggtattattgttaattatctaagccttgccctttaccctcctgtgggagttgggacattcggaaaaagacagcatggccaaccaagaagcagagagtaacaggaagtgaccaggaaaaggataacctcaaagacacccatgctccaaagacacttcctcctcccaaagtttcgatagccttctaaagtcgcaccagtaactgggactgaccattcaaagcctgagcctggtgtagattcaagcaataacaatagttaatgtgatcattattctgagttttgcagagttcacattgtcttcatagacttttcaaactgcccaaaactagtctcaccaacgcttaatggaatatctcagctgtacttactgcagatggcaaaaaaggaggcgtgggttatacagaagagatatgggaatacttctggggccaccttatttagaatggactcttcctattaattacaatggctttcttgggtatattctcactctatgagaaaaagccacttctgtggaaacagatcagaacagatcagaagtgtaatatgctatgtccattggacttgcttcacataagataaacaggcagcagagggatgcgggctcataaatgcaagatctacttttctttctatctgcgatgcattcatgactttactgtctcttagtttccttcctggaatattcttgaacaactcttttgatagccttttgatatttagaaggctattgcagtcttttgaatatgaacttctatcacactaaatcctatattttgtgctttaattgttgtattttgggtggggtgggggcccatgtggcagagagaacaaatttggtcttcacagtgatgattctgtccagaatcctgggttgagactactatattttgcaagagcaaagaattacagaagccttcgagttctgagcacttggtattggctgcctttggggagctggtgctaagactcatttgtatatcacatattgatcaccttgcttgtgttagatagggaatttccccagccagccaacctggccacactttgatctgcttctcaattcctgaggtgtttatcatctagctctgtgcctgatattcccattcagccatacacaatctgataaggttgtctgtgtatctatggagcattcatttgtctcctcatgggcaatgtgtattcttggaaggacagaattacattttaggtttcttttttgtgctttatagcacctagcaggtgtcagagtcacagtaggtgctgagcaaattcttttccaattatctacactcatgccaagttacaaagatagccataaaggcctgcaacagagcatgcaattctatacatattgctaggggataggcgggaggagtacgtggtgctcattttgaatgggaatggccatggtgggatgtgagctgcatgactagctcttggcattgattcatggaaagatataaacctgcagttatttctatgcaaagtaaagatctctggtactttggttttctttggacccttagaaaaaggaaggttcaatatcctgtgtccatgtagacaatgatagaaagaggcacgctaaagaatcagtaccagcaacacactgctgcccattactgtagcagttagggtcaagtgcgggagcatgaacagcttctaggatattgcagaaactcagaggaagatgatggtgccatgtgtctatgccagtgcagtggtgagaagctggcctgaaggctctattttggtagcagagccagttatgtggaaaattgctctgggtctttttaatgactgcagaagtctaaagaataagttccaggatgaatgttatcctcaacttcctggagaccagttgctggtagtagatcttgagtactggtgtttggatcagtcacagcatctctggaactctgacagatggtattgggaaaactactgaggtccccctgtgagtttcactccttttagaattggcatcagacagttagaatatatatttaaaaaaaaaacacaatccattttctagacagttaatcctatccaggcacagccacatcatggagacgtgatcatagaatagcttctatattatgcccgacactgttaagactctgcaatctgaatcccatagaagggtcatctgtttgcaagcagtaacctagaacaaagtcctgagaaaactgggaggatgctatggacttctcatctcccttctgcttccctgaacaaggaaaagccttctcctagagagggcaaaagcaagggcagttggcggagaacatctctgctgacctgcatggagaccccaggaaaaaacagccagccgtgcagctatctggcagctcaggaagagctgggtgaaagtcctaggggtgtgccatttaatggctgtaacgtatagggggaaattaacagacacctgagtttcagttcccttagccactcagtggagatagtgaaaagtttgtggtggttaaatgaggcaacataaataaaatatttagagtagggtttggtataaaaatgtgcactatattttttctctattaatatttgaatctgttatatacttgttatagtcactcatgtatatttattgtgttgttagtatattatcaagctaggtccattcacagccatttggatacccaccctcagtggattcaattctgggttgatactggttccatctgcttaaatgtcggattgatagccctcgtaacaccttgaatccagtacagaagtctactgtttcagttactaactttattacttacttttcctgttgccatggctgaaaacagcaactttggaaaaacaagttttatttcagtctatggtttgaggatctaggtcatcatggtggttgaggtggggagacaggagtgggagacaattgttcccatggcatctacagtcaggaagcagggagagatgagtgctgcagctcagcctgcccctcctgttttactcagtctaggaccctcgcctctggaatggcaccactcacactgcatactgtctgtcctcaattaaccgagtctagaagatgagtcacacacatggctagaggttgttgccctacgtgattctagagcccatcaaactgacaaaatgagtattagccatcacacccatgtcaactgctttctgcaagtattacatggataattacagcaatgaacaattctgagaagcacaatgaggacaaaatccatgtaccttcctgctatgtccctcttttgatggaaatcagtgtgtgtagcatgtctgtaatgtctgcagtttctgtaggtaacttagtgtacatcttggttatctgatcactgtattgtaccatggtacttgtgctcaaataactcattttatattgcaatggccaaagcacaaggacaacaatgcaaggagaaggcagggcacataacacaaaaggacagcataaccgtgggactatgctgcaatgctacaaggaatatgggaagaaccagccatacgaagggctcagcatggtctaagggttgttgagaacctcctttgatgctaaagtgatgctactagacctaccaaacctagatctgtgttgaaacccacatctatgaccccacatctctgatctacaaatcagaggtgctgtttttaaaaagaatctgaagaccaagtggttcaataagttacacagtgccaaattatggtggctgtcaagtatatgtgacatcttcctgaagatgattccatgtgtgtggtgggtttatatggcaaggaaaaggataggctaggcatgcccacttcagcctgtagcaagtaaaaggcaggccctctagacctctggaacttttccttttcatccagtcttcaagtgtctagtgcatactaagacatggtgtaaatacattctgcactgagtgcagttttgcctttacaacacaggcctatggattggtgatcttgacttctcctgatagcattcagtggctttgggatccaaactgtgttactgcttggtgtttggttcctttgcctttgtgaacatatcctcctttgtggactatggatcagagcccagatttttccaagtttcctttcccttgcctcttgcccccagcagctccccaatgctactctggacacagtaacacagtcaaaactgggatccaaaagcaaatcagaaacccatgagcctgcagttggcctagccccttggaggtatcagccttccaagtaggaaggacctccttctatgtggtctgctcagtgatcatccctgaaattcttgagggaaaagcccttccacacctaagcccctccttgcccaggagtcatgccaaagcattggcttggttccaattaacagtgatgtgttagctgcaagggaagcaaggggagtcagttatcagcagtgatggcagggaccatgagaggaaaacaatgagcttgtcccatcctctattcccccttccttctttggttctgtagcagtaagatttgtcatctaatagaaaagaagaagccctatggccattggctcactgaccaaattcactccatttctccggacagtagataattattaaccgcccactctcccctaatgcctggaaaccagcctcccattgtgttcctgggatagtaaaggaagtcaggttagcagccaggtttgcagtggttcatttgcttctgacgcaggcgggctgcttgtgcttggataagacagtgggcttctgccactccgcagccctgctccggtttgttttattgggcaataaattaacccagaacactgccaaggagagacagataaattagggcaacaatcatatttttaacaggaaaattggctttgtttcttggtagcatcatttgaacgatgaacccagttattgtaggttccagtactgcagataggataggatcctgattaagcacatcccagagagggatatgatgggtagtcagaggaacatttaattggtatcttaggtcttggaagaagcctgcatttcagtcatgtgtgatataaattctatctgcattttaggaatattgtgaacgggtcaaggctggttcccctgcacgctataattaggagagtcctacttgaagacttgggagaagtcttttatgatttgaaatggttgttagctgcaaccctgtggtttaataatgacaaaaacagaagtagactctgagaagaggctccctgtttgcgactcaaatcttgaaaagccaagaggaactgtagtcttcagaacttaagaggaaggctggatccctccctgtcttccatcctatctagacttgcagttgtgcctggctcttttgaactcagtgggagatgaggtgggtctttgccttatactgtcagctgcatggcaggagtgggtgtcatttgcttgctctgcagcatcccttgctctgggaatggtgcccaatgagggatcaatatatatgttggaaaatgcaattataaacaggctattttctaccattggttggttactcccttagagcttagtcccacttccaccagctcttcccctcattaatccaacctcattgataagtctctccactctttcctcaattattcctcctctacctcttcttcatcttcttccttcccttcctcctcctctacctccccttattattctttcttattagaaatagacttacttgggtcatattttctgttgtctcaatttgaagttaacatctcatgtattgattttttttaaaaaaaaaaatctattccacagacctttcaggttgatttacaatttttatctatttctctagtcatatgaatgtgaattcaactcattctccaagtataatacatcatccgaatagactcttcttcatataacaagtcgctttttttaaattttagaattattttagaaaatagtttagcattcactggatttttgtggcctgccccccacttcactgcacatgactggtcagtatgtctcatcgctcaagaatccagctttctgagagaaatcaaatttgtgtttgtatgtaactagccatctaattatgtcttagaaaggtagaagagagagtcaggagagaagaaaatttaaaaaggagaaagaaaataaaaacatatgtttagggccatgatttaattcaccgtaagtcttggagaagaaaactacaaagagtttaaagtcagaaaatagggtgtgccctgacgacctcttgagtgcttagacgactgtcctatccaatacaggaagccttctgagcttccttgtctctgtcatttattaagttttcatgtgtttttttttttttcctcttaggagatttagaagaaatgtcagcgctgtgcacagggattgctttattgggaccaatcacttgcagtggaaatgtgtttactaagacaagtgccattttcagcataacgtttgtactcctggcagagaattttaaagatgactcaaaccttttatttttttttttaagcactgccttataattaaagaaatccaattttgatgatttaacattttccattattctttacagttctactcttagacaggaaaacagttgcaaaatagcttcatttaattaggatgagaaatatagcaaacatgcaaatatatacatatatatattatatatatattatatataatatatatgtgtaatataatatatatatatattacacacaaaactacatatatatcgaccttattttaaattattatttgtagagatagcccactatgtgtgaccaagaaaattaatttaaggcctctctctctgttgtactcatttgttggcaagcatggctcttaggttgggcatcaagagtctgtgatactcagcttcaagctgtgacatggaattaagtgggcttagagtctccttggaaaaattagaaatacacagatatatagctaagggtttacaacagattatatggaattgatggctctcaaagtgcaaaatggaaagtgttttgaaatagcaaacaaacagaggcaaaaatccaaaccccagggagagcatttagtgagttatctgttcatttactcaatgattgtacgcactttttacaacattgaactctagatactgggtcctgaggagagagtaaagatggaacagttcaaaaaccactccttagagagtcatcttggcattatacaatagtcaaataaagaagtaaatagagttatgtcagaaaatatgtcagaatataaatcaggggtggacatgtgtggggttaggaaccagctgtatacacctctctgtgtgttcatgtttgtgcatgctcacagctcatatacagcttcaggaaggctataagaacctctggcccgaggtcagtgctgaataagcagaggccacttactcaaaaggtggcatgctcgcctcacactgggggaaagctagcataggttctttgtgcaatgaagaagggcaggcattgcagaacacttcagatgttcaagacatggaactgctgagctctgtttcaaatcagaactcaggtcaagaaaggaattacactgcagatagaaatactgttgcttttttcttttcttcaggtgagagatgttttgagcatcttctgataagatttcaaaaacctcagtacttggcttggcagccatggtgctgtgtatttgtttaactgttttttagccaccttactctgtatcaaacagtgttttgagtgcttcaccagggatcaagagccatcttctcaaattcacgttgctaggacttggtctgttcctgggtcatgctctttggcctgacaacaggaaggagcatccttgttcagagcatggtcacttggactggtataaaggagtcaggaccctttctatttacttatgggctctggaaactgtctgtaagccatgatgaaacattctccatcagactgcaggatatggtagccatagcaacatgggcccgttgagcacttgaaatatgctacagcaactgagttgtttttatttgactttaattcaaacacagtcctgaaaatgaaagtaatacaaactatgcttcctgttagtgtcatttgggcaaagctacttttcatgtgacgggacaattattatgaggtagaataacacagttaaagtgtagtagagtattggatacatgagtgatttctagtatctccttagattttaatattattgctaaaataaaatatttttagtgtattaggttaaattaaaagtattttgagaatgaatattatcttgattttgtttagaatttattttatctttaagtgtgtgtgtgtgtgcgcacatgtaggaatgtcatttgagtaatggtaacaactgaggccagaagaggatgccagagcctttggatctagagttacaggtggttatgaactatcagatgtcagtgcttggaactcaagttcaattctctaggagagcatttttatacgttaaccatggaaccatctccctagcccttatctcttgctttttagatgacaattcagggcgattacgatgacttgaattctatttctgttggaagttcatccgtatagccctgggaaaggggttgagtcgagagggaatccccactgttttgatgccgttgagctgaccttttatgaacctgttctcagtggaccactgtgttcccactgagcttactctggtttctgattctagaaccagcaggtgttgttactgcttgggctttccagatagaatgccaaaagagagttctgtggaaagtctaaggcattacatgtgatgtatgttttgctccagacaatctggagctggccacagtcttttagaccccctcacgtaccttttcctcttgacaatttcatggccatgcttaatgcttgcatggctgttggcagggagcagttgtccatctatcatgatatttgaagacggagcatggtcttattagactatgtatctggtttcagaggttcccagaagcaagagatgacagaactgtgcttgcttgaaagatctcagcagtcagggaacaacagcctgctctaacaacttgggctgctgaaatccaggtggcaggaaatggcccactcactgcaaagttctgactcagtcccaacattcactttggtctgaatctccaggcccagattgtcgttgtcatgatgtcaaggaacagtgtgggcatgtatatagggaagcaaggctcggcttctcatcatctgagctaactggtaacattgctccaacatcatgctatagagacattgagagctgatccttttggacagcccaacccagtcttgtgactgaccctgctcctgttggctgctgtgcgtgtattcatgccttttccaaatgtgtaaccacgtattgcaatttcttgggtgaattttttgggtgggtttctcctctctcttttcctttttacttctctcatcctcttcctatacctccttctcttccatttcctccccctcctcatcctattttgtttttttgagacatctcagttagaacaggctagcctccctctcacagtgcagctgaggctgatcttgaacttttgatcctcttgcttctaccttccaagtttttctagctaggaaaatgccaatgtgtggtcctgcccttagagacactgaccaaattcctatgaggtgaaaaccgggttttacaaacccttaaggtctttcgttgagggtatggtacctccgtatgctcatcatacctccacagcctacttgaagggattggaatacatgatttttttctgggggcaggagggaatgtgtaaacatcttttctatctttcttttgggaaaagctttcagaccccatggtccacaaagctaatggcccttttccagattaatcactggccacataacgtttcactggtggagccaggtatctctatgtgcctgtactctagtctctgagccccaggagggcagtggttatggttcaaaggttccctgctattgaattaaatatttaaatagatcctggtggtacataatgctacccaccccaatgctttatgttcccaaatgaaagacacacacacacacacacacacacacacacacacacacacacacacaacctttatattttgatatgccttaagcagcacagtagttgggccacttcccaacctccacatggttaatccacctccctctcataattccaagttatcacttactacatttaacattctgccttggctgccttggacccagagggctgcccaactgtgccatgctctcctggctccactcttgtcaggcatggtgtctctcctcttcttctccaggcatggcagatctccttcttcctccttcctctctgtcccaagtctggggatcctaaaagtcccacctctgtctgccctgaccagccattggctgccagcatatttatttaccaatcacaaccaactgaggggcagggtccttctgtgtgaattctcttgtgcaaacaattttggggactcaaattaatgtaagaaagcaagcagcaacaccctgctgagtatgcaggtctagtaccaagctgggtgtacagtcactatgcaataaatatatgtttaatgaataaataaacactaaattaaaatgtaacaccttctaggcattgtccagcccatgtacctagactaacagtgactcatagtcaaggcaaagaggactacaaacccgcttcctccccccactcataagatttcaaaacgtctttcaacatgtttctttgttcactaaaaaattgaagtttattagaaagcattcatgggtgatactagagggtgtggtatctcctaatagataactgaaggagattttgtctaaagaacaaatacctaaaattaaccaatttaaaatgtttttgaatctatgtcaaagaaaagcagtgtgtctgccatatccagggatccattccataatcagcttccaaacgctgacaccattgcatacactagcaagattttgctgaaaggacccagatatagctgtctcttgtgagactatgccggggcctaacaaacacagaagtggatgctcacagtcagctattggatggatcacagggctcccaatggaggagctagagaaagtacccaaggatctgaagggatctgcaaccctataggtggaacaacattatgaactagccagtaccccggagctcttgactctagctgcatatgtatcaaaagatggcctagtcggccatcactgaaaagagaggcccattggacaagcaaactttatatgccccagtacaggggaacgccagggccaaaaatatgggaatgggtgggtaggaaagtgggggagagggtatgagggacttttgagatagcattggaaatgtaattgaggaaaatacgtaataaaaaaatgttaaaaattaaaaaaaaagaaaagcagtgtctttaaagaatattttttttccttttatactggattaatttgtaaaacagagtccttggatggacagcaaacacctagccttgaattaggtagaaatgcagattctgggcctgtccagaagctcctaatgggaaagatagaaagaatctggtcatctcctctgagtgggccctccttccaggtcactttcatggagatgtgggtttgagaagccctatcttggggcaggtagcccaaaggagatttggtatgaaaatgttggagtttggtgccctgctgatagagattcaagtttaagttgagtgtagcagggaattcgtgtgtgtgtgtgtgtgtgtgtgtgtgtgtgtgtgtgtgtgtgtgtgtaaatgtgtgagtacaagtgcatgcttaatggtatacaactgtgtatgtgtgctttatgtgagtgtgggcaggtgtgtacatatggatgagtgcaacatgtttacaagcacatgagtgagtatgcatttgtatgtgttttggtatgaatgcacacaggaatgtgtgcttatctccttgttgctcaggaactaataacaagcttccagaagctcccgaagttctcctttctctatctcccatcttatagggggctcactgccattacagatgcacactgctacaccaagttctatataggttctaacagttccaactcagctctacatattggagctaagggctttagtccctgagcagtctcagcatgctggggcctcttcttcatccctacatcccctgtccagtcagccctctagcttgcaatgattagacacttggcaacttcatgcatcgaaggcgtgaagaactgtagggtggtctagaagttcacataaatgagctcttgtacctgatgatcttttagtggatcagatgagggggaaatttcagccctcaggctggggctgtgctgaaacaagcaaccagattgttacaataaggatgtctaccccctaaaaagtgacagctttccctacatctgagtttaaaaccttagaagggaaaaaaaaaaaaaaacaaaaaacaaaacaaaactatgccataaacctgactatattctggtatatttccccctgtcaactatgtcaaggctcttaaacctatgaaataaaaaattcttcacatatcttctgccccctaccttactgatgcccagctctgtgcttcgctcacctgtcaaaagtcctgaggtatgaggtgggtctgaccctgactcacctgcccttcatgtaaatatccttgaaaggatagtaagcggtgttccaccatttcctcctcttgccttctgtctgaaaaagatgcaagaagctgagtgtgtatgtcacctgccatgctctcatctttccacccaaaacacttgccccatacaagtggcatgtgtagtcttttccatgtctgtattgagtcagccagagctcaagcttccctgtgcagttagcatcttctgatccttgatgggtaatgtggattggtgacacagtcccaagaatcagggtgggagatgagactttgatgggttgagggtatcttccctccttcagggcaaacataattgtatatgcccagctgtttgcctctgatttagcttccaatttcccaggctatgggagctgggatttgtgagcagcaagagggttgctctctcttgaagatttctacttcagaaagtgtagcttatctatctaaatttaataataaatacaaaaatatcattttgaaggaggaagagagatgtcagaagtggatgaactagggaagctatcctctggagatctggatttctctctgctgtgtacttgacaaaaggaatggtggagtcattctcagcctagccagcactggccaggactagctcatttgctagggtcagcaggaggctctgaagaggagaaaatcaacagaggcactaatgggccttagtggatgggcacatttgtgatcaggcccagcctggggcaagagggcattttgaaacctattggatgttggcatcgatgtgggatttacttcctagagtacatcaataatctttcttaaaaacaaggccttggatggctaaaattattcctgtagaataacttgaggttatttctagtagtgcctctaatgttccagtaatccatgaaggggctgtgatcatacattactgcaaactggccttgaggaaacatggagaccagatgttctgtgtctgttccatcctcttttggagggatggttatcagtttgtggatcacgcataggattaagggcatggtcttctcagacacagaatcacacttggaatcttaagctacagttaccaaaagacaaaggagcttctgcctctgctcagaaccttgagtctcccctaaacttacaagcagctctgatccctagccatggaccagaaagggagtaaaaaggaaagctgtggacccatgcctgttttgtggctattggaaagtaaattcagcttactaggtaataagatgcaatgtctagggacatgccacttgcatctagtaggtttcttggaggtacccattgcattcaacagtagaaattcttaccagagagtgatcatgtatgtatttttcaatataaatacatttctagattcaacatacagatgctcagaaaagagtaatcaagtatatatgtgtgtatgtgcatatttgcatgatacatgtgtgtttgttcatatgtttgattaattcgtttcagtccttggcaagttaatacatacataactcagtgatagtaagcacatgtaaattatagtcttcgccattatccatgcatagagctctttatcttgttaaatcaaaacttcactctcagttatcaaacaatgattctctgccctcccctgccattcctctgtaacctaataacattccttagtaaccacccttgctatctctttgaacttgactactcaagtgacttctaaggtggaatcctgtgctctgtttgtccatctgtggctggctcctttcatttagcataacaccttcaggcaacctttgtgacattatgtactataggatggatagccttttgtgctggttagttttagccaacttggcacaaactagagtcacctgggaagaggaatcctcagttgaggtatagcttccatctgattggcctgtgtgtgtatctatttgcgttggggagaggggtagatattttcttgactagtgactgatttggaagggcccactgtgggcgatgccactcctggtcaggtggtcctgtgttgtttaagaaagagactgaataaagccatggagaacaaatgagaaggcagtattctttcatggcttctgcttcagttccctcctccaagttcctgccttgacttcccgccatgatgaactgtatgatgaaataaaacatttccccctaacttgcttttggccatggtgttgtttattaaagaaacagaagtaggacgatgcctttattagatactgaaaagcattctaaatgtacatgtatgtcccaacttgtctctttgtgcttctgcctgtggatccttgactgttttgatcttttgccagtcatgaatgagtcccttctaaacccgactggccaaaaatctatttaaatcccttctcaaccccagctttgcctttaatataatctaagagctggcaagatttgagaagtagggcagagaaggctgtaaatgtaatccttggtgacagtgagtggcaagtgttgacctggcagtgctacccatgatttctcatcttataaacctaattaaattaaaaatccagttggccaaacccacactcacttaagccaggcaatttctcacaaaactcattaactaggacttgggagtttcaccaacagatggaagtttcccccatgtttttcaatgattagatagaaaaggaccttcaaacttcagacctcaaatggaagatcttgggttgcttcctgaagcatcggttttaatgcttgttggtaaaattaggcaaaaatgcatccttttaagtattatgaggcaatgacataaaatttcagtgtcattaatctgaggctgtaggaaggacaggaatttaggggacattttctgactcattgttacaattatttttcttcatttcaggtttgtttttttttaaatagttataatagattatcaaaaggaacatattatatgggtaagatgtcataattattggcaaccaaccaggatttcagagcatccctgcatgattggagtcactaacctgcagcagctctcatctgaacctggggctaggtcaaccttcattttgaaggaggaagttgttaggcaattagcttgtaattgatattccagattcttctttggggaacatttaaagcaaaaacaaatccacaccctccacctctgtctgtattagtcatatttatcatatttctctgtgtcctcccacaggcctgctattgccttcattctgtctctcttgcagcagatggatggtctgtaagaaacttgttctgcatagcttatgttaagagggactctcactgtcttctgggctggtcattttgggctgacatgacttataaatggacataggtgcattgctgtgcacatacttgattaataactattgttagctatcaaccacttgagatcattaatgtgtcagtttatctctggcaatgttcatatatgggtatatgctatagatggctataccaattaattcacttattacatatggatgatagttatatttggttgtgtcttgtgatcacagattcctggttttcacccaagtgtattctctgcttcttcatttaatgtgtgctcattaatgtgcttcatttaatgtgctcaccacaacagttgaatctgttttttcctggatgcctaatatctctttcaactgtctctggacctgtcatgcctctttgtagtgagggaccagtaagtgttctttcttccatccttgtttaaaccctttttctcttgagaagtctgtcatccaattaaattctattggtgtctttcgtcctaacaggctatctccctccctccagacccttattgctattctggaaaggtgccgccatccactctaaactatgtacatggcttttcggcatgtacacggtatcctccatcccactcaccccacacactagggtgcacttaatccccactcattggtccctgcgtcctgtgtcacctggagccacatctcatttccatgcaaggttccagattcttgaatctcatccttgcccttccattcttcttctgtttccatgctatttaatctccagatttgttccccatcccctttcctaagtactcatctatttaatgaatactgagagagctgatgcagttgagttcctgccaacaaaggacatgcattctgtcatcagagcacttgcagtccagccttggagagacacaatgatcaaaatacagcaaaaaatcatgttactgctttaatgtggagtgccacaaagagactatatacttgcaggcaattttttatagcaacaggcaggaaataactgtggagttgattgctgatggttacgcaagcctatgagaagtgacacttgtagaagcctagaactggttgtgcaaaggcccagtggtaggaagggctggaagaagtgagtggttaatgacaagatctgaatgtccacagtaattggagtagaaagagggaaggagtcttagatacagctagaagagatggatctgagttttcagtgaattgactctgccggagattattcttttgttccatactagagttatgatttgaagccattggtgtgggtcccttctctgtgtcctaacattccaggtcattcataggttcataggtttacatttgggaaaatcactcatttcccataaatgtgtgtgaaaacctataaaatcttagtaatttctgctcggttattttatgtatgaatttgggaccaggggtatagtttgcttgtagagtgtgtccttagcatactcaatggtggggttctagttccaacactaaataccagtgataacagcaaagtcttatacctgaacgttacatatgaagaaagaagtcgtgttcccaaatgaagcactgtgcttttccagtacagcggctccttaaaggcattgctgtctctggcttattttcttcttgaacacatttctctttcattctttccttggagtttggatgtccactgaaataatttatatcatgtttgtttgcacatatctataaatcaattgcaatgtgtcagactatcagatggtaaatttaagagacctttggctatctaaatgacctggtcaaaacacctcttctatactttataaatcatttaaaatttatgctcacaagagcaccttttgaggtgtcaatatcataccgatttaggagaatcattaaagctttaggaatgaaaaaatgttacttgacagatttgttattaaaacctgctcccccacactttttattttccacaaaacaaaacaaaacaaaacaaaacaaaacactgagatccagtctgagcttcaggtgttaaaatgtagagaaaaagtgcaggcttttcacagatgacaagaagcataagaaaaagaggttggggtagaccctgccttgatttatatagccatggcagaggcctggtcctgggagggagctcttctatagcctctccaagggtcctttctattctgttctgcattagcttgggggctcatgtgctgcgtgagcaatcaatttgggtgccgcagatgcacactgtgaatcagagcatccactgagtccatgcatctgacttgacaagagaagactgagagacacagatgttttgttgggtattgttgtcatcatactgcatcatgtttatacacgagaggtatacaggtggcatataaaagtgctgccttttccagatgaaaatacttcatttataactggtcaggaacctcccaagatcctcccctaataagtttctcttccaatcctagcatttcacagactgggaaactgactcccagggtgatgaaaggtcaggctccatacatctagttcaccaatgctgcctagtgaggccccatgatcctgctgcctctccttgccacttgccattgtactccatacttgcggtctggcctctctagcacaggcccacctggaacatcaggaatattctttgtttctttgtgtgtgtgtgtgtgtgtgtgtgtgtgtgtgtgtgtgtttcacccccattctctcttcctctaccatttatcgggtttgacatggaagcggtggtgttgctatgattggtcctctcaaggagtctgtttatgtgtaagacatttcttagattcataagattcttgattcatttcatctttggattccacacctgctcatggcagcttgactttattattttggtctcccgtttccctgtctcttattctacaccttgcacatcatggtagagaaatgtccaccgagattattacattcactagccccagcattgcaattttgatgttagactgcacacccctctcagaaacaaactgtccccagatggttttgccttgagaatttgcccatgtattttttttctgtacatagttaatttttttatatataaattaatttaaaggaagaaaaaaaaagccacataccttcaagcatcagatagggaaaactgtcctttttccaagaaaagtctctgttgccagtagccagtttctatatagaacatgtaccatcattgattagggtcatttgttctgctgtgagctgaggagaatgtacaaaagcccgcttagaaaagaattaattcctcctcctctccagactttctggagcacgcctagtagattctccaagcctgtgggcctcttacatatgttctaatgggctaattgataaggctacatttgtgaattaatctctgacttgagctaagtggttttccctaatggctttaattcaggaacacccactcatggccacatgtcagatttttgagacaagctgaacaaaaatgaagggccccagctcccctcccattgttttgagtttctctggtaccaggaaggaaccagtgcactccctgttcgtctttattttgttttgcatttatttgggggtattggacatgtgtgcctctgcctgctctgtttctaccttgtgggttccagggatcaaacttaggttgtcagatttggcagtaagtacctatgcttgccaagatatcgcacaaggagactctacctcggctttgtaagaaaactccccagagatatgactcctttgagcttcagctccaggtccatctctgaaggcccatgttttctcatgtgtccattgatgtgactcagcctattactacagtctaagcccagtaccctgcagccctaccagtatgtcaagtaaaatgataagtaatagtgaaaagcagagaagagagttgtatatgaccacactgggaagaggaatgagaaaagaggttaagagacattcccaccccagttcacattcaaggtactgctctgaggattgggcttaaatagaaggcaagaggcaccctggtcaagtgtggtcctgcccatcattgacccattagtgtctgcctccattccatcctacaagatggtctgacaagttgtcagaattgtatgaaatccctctttcctgagacaagctccccctggtctagttggcatcaaaaaaccacagtctttcctgtcacccagcacaagattactggttaaactctaattccttgagggtccatggtgtcagtagtctaagacctgaagtgcatggcttagaatacctttactcctaccatgatggttacaaacctgacaactggagacatttctgcagagctgcttttttttttttttttttttttttggaccttggtgtccgtgttgtccctgaacaaagaattggacaggatatctagatggtagctagcagacagagataatttattaaggaagaatccacatcaagggaggaagtgggctagatcaaagagagtttttgtcataaacagccatgctgtacaaaggatttgcgcttccatattccataatacaggcattttgataataatttggcttttctgtatatattccatctgttacgtgtagttctatgtataactccatgtgtctaatgtctcattagtgtcttaagtctccattcaggagagtgctgttgaatatcaaaatgatgcatgggtaaccttcagacactggagtaccttacctttgcatctgtgctagcagcccattggctgacctcagccacactttctcccagccttcatctttgcccatttgttctttttatatgctaatttctcaggaattgctttatagctttctggccctccctctgtgctctctctgcctgccccaacttcactgaatctgcctttccgcaggagctttggtaactgaagggtataggctaggcttgctcacactgtttctcattttcatgacattttccctcccaggcatttgaaggatcttcatggcttgctaggatttccatccagacaaatggctgctgatgtgccttgctctcatctcaattcatgcctagactcctcctgagaaggaggatggactttttgtgtgtactgttttcacacaccgtctgtgttcctggcattctttggtacaaacacttgtcatgtttcatttcccattctgaaaataaatgaattctgttccattgttccaatgatacttgtcaagctgctccttccttccttccttccttccttccttccttccttccttccttccttccttccttccttccttctctctccctccctccctccctccctccctccctccctccctccctccctccctccctccctccctccctccctctctctctctctctctctctctctctctctctctctctctctctctctcgccctagcactctagaaatagactcaatagtctgggctctagaagcctcaagaaggcaggctcagccatccctccccaatttactcagtgcggccacattgaaaagaggaacagataaaatgatccagttgacccctgtgtctttcagtgatactgacacgaggtttagacttaaatagaggacaagagatgtgtgtgaaaaagcaggacttaaggatggtcctccctatcaccaattcatcttgatctcggctcctgtcctacaaagtggtctgataaggcagtaatctgtcagtcactgtccccactgctgccttgggacctatctggtttcagccagatgataacctttgttctagagctcagcttgaccctcatggctaattgtcctatctggggagtggtccatcttgagaacattagcttcttctagaattcaaggtgattccagacaaaaagttaagggtaaataagttagctcggtatgttcatccaaagtgtggatactaaacagaagcagagatgccaggctctcatccgactttcagttttctcttggatttaagccaggagtgagtgcagtgcactaaaagcagtctctaaattcatatgagtgtttgcagtcagtctgagagcttatataacagtgagtactgtcaaagtgctcagctgagtaccgttcatgaggagttaaacaaactatacagacgctggtgtcatgacagacagacaaggagcaaatgacctcttggattataccaccaaccacatataggcccttgtgtgggaaaggcatggtcattttaaaggttattttatgacttagttgctggagataacatgcatttccctgtcccttggatttctatcttccttaacactggggctttagaagtaggcagggtcttcaggggccctgcactgtactgaaacaatatgagcatagctgtaacttgtacaaagaacagctacttggagaatgaagaaatactgaagcaagaacccatattgtctctactctcctttaactactcctccatctcttgattgatgatctgccttcagtagctttagcatacaatctctgtcccttctttgaacaactgactataattatgtaacagtataggaccccccccccccagtgtgtgtgtgtgtgtgtgtgtgtgtgtgtgtgtgtgtgcacaaatgacaccacaacccagatgtagaagttagagggcagcttcacagagtaggttttcttctactttcagtgggtttgctagacttgctcagccactgcctttacattggccatggttttccttcccaaaaaacaaacaaaaacatttagaatgtattgttttgaaagttggagaaagttggtgagtcatgcccttccactcaggtggctttgagagagccatgtaacaagtggctgagtctgttgggctcacagttttttggccaggtttctgcacaagctgagtctaggctgatagtatagtcaagcctgacatgaacacaaggcacgttagtaactgtaaagtttacatgcacagttcaccttcttactgagtaccactttattattattttatttgcctacatgcacagttcaccttcttactaaatattatttattattattattattactattactattattattttatttgcctacatgcacagtttaccttcttactaaatactgttttattattattgttattactattattgctattattattgttattttatttgcctgttgggaggctcctggtggttgggacagtttgaatttcccaatctctctgagagaaagccttctggcaggtcacaggatccaagccaacaggggctctgtggggaccgtattcctcccgtgttccttttgctattactcttgaagatgctgctgtttgagtttgaagaggccagcagggtgtatttcaaactcttgtcactgatttacttaaataagtgacacataattccaaagtggaagcaactgagacagattagtgttagtgactctggccatcctgtttctgggaaaatactgctttcacagaagtgctgagatcctaacttctcacagaatgtaggtgccatttgcaaggtctctgagtgttcctttcataagacatagcatttggtggcataggactgtttagtgagccctgacagcagctctacattcatacacatggagctaactgggcagggatctgtgcccaatcagtaatttatgaatgaaggggaccctcccctctgctgtcataacaccccttccctctgcagctttctgagaatgaggtcaggaccaggatctaactgcttatggctcagaaatagcatcccagctccaaattaatctgacactgtttgtcgtaggatgaaaagcctgcttatagctttatttccggtatacccttgcacacaagctgtgaatgaacccatgtgaagagcggaagcagaggcgagccagccaagaactagttgattgggtagctggtggttgcagacaaactgcaggagctgtcttgcattcaatgggagccttgatttgaaaagcaaagaggaagaatgaaatataccccagtggtgtagctctctaaccaccactcttgagaaaggagtgctagctattgctgagaacactgtgtgtcccttatgttgtgcccagtcatttctcacactgtgtggctagctgatcacctctctcctgtggttccttgggcggggaggggggcgttcagtgctttaaatgggcattacacatacactgcattttatatcaaccatattaacacgcacagaaaaacagaggagtgtgcaattttctcttacacacagacacacagacacacagacacacagacacacacacacacacacacacacacacacacacactaatgcaccacagcttaataatacttagacttagcagaagtaggggttactctctttccatcattgcaggccagccagatttctgcatatggatcctgaggagagttcacatgtctaagggtcttccctacagtctctttaggagttgtgtatatctaaagggcagggttgagcagcacacaggcattgtgtatggttttgttgtcctttttagtttatttctgtgctcagccttaattgctggctcttagtgtcttttttactgggatcattttttattggcattagtcgtcttctctgcaaaagatgaaataaatcattggaaagttgaatgagggctagaggtgttagtagcagcctgatctgctacaggttccttcagtggacttttatgtgccaggtgtgcattgaaggagatgtcaaagctgtcttttatatttgtgatgattttgaacaagggcaaaaagcttaaagactgtcatataactaaatggtcagatgtatgacctagttgacattttttgcatttaatgttttctctacatgtttgagaaatcttataagcatactcagaattgagcaaatttatattgatataggattgtgtgtgtatgtgtgtgtgtgtgcataaatatttctcttcacatgtacccaaagtggtatctgtagtagccaatgtgcacttttcaaatggatatttcttatgtagagacagaaagcagattagcgactgtctgggcccagaggatacaacagggattaatttcacaagcaagaaagatcttattgtggtgataaaaatgttctgaaactggatcacggtgatgtcaataagttggcaaattttacaaatttattaaagaattatgtgttcaaaatggatgcattttatacctcaacaaatctgttaaaagtgatcgttccctttaaatcctagggtcggtagaggatgaaaaatgtcatccttccaagtcttttaatgctctctttccctgctaaagtttgtttaattcagtggtggagaagctgatcttcaaggtgacagggcaggatcaaaatctaaggacacaggatgggaaagtctgccctgacctctattggcaagaagcaaggttactcccactgctgggtgaggagtcaatgtctgggttgtcacagggcagggagcacatgagcacatgagatgtggaagcagttgttacagccactcagaaatgcaagctttcagctcccagcccttaagtgatggagtgtctcttttcttttgcaggttgtgttagtctttgctctcagcattggtgccctcgtaatatacttcatagactcgtcaaagtgagtatgcatatatgttgtcttgtccgttgtttttcccctagggcaattatgatcccttatattgatgagcttatttaacttaatactagccttaccgagattctcctgagtgctgaagacttgaaggaaggcggggcttccctgtgcttcatttatgaatggggaaagttctctcaaaagaacggctaggttgatactgatggtatggaagggagaggcacttagggaccaaaccttcttgttgggtatacatttgtaatgagctgtttcctgattgagtatttatactgtacatgccaaggggttaagagggctcctttgggagtgtgtaagctctgggagagggtgacagagtccaacatgagcctgagccattctagccacagccataggatccttttctcatccagaaaaatcatattggaagatagattagaaagcccagtgcaaggattctacctgccaaatgaatatgtagctgaatcaatggtcactgtgcttctccaattatgaaactaaagaaatgggataaggcattcatgaggcctcccagagctagaggtctgggactctctgagaacttgtagagagtgatgctcatgaagacccttggagtggcaggttagtgatctggaaccccagggtaagcatggttcacagatgatgaacctttggggaggctgaagagaccaggcaccatggctactcttaatgctgtgggaaccactgctgaatacatcactttttccaactatcttactgaagtctcaaagttgacagcatctgagacacacagatctgggaatagacttgcttttctgctgtgacacaaacttgacagctctggccaaggacaagagcccttgaccttgcagtcctcattgtttactttgggggtggttttcatcgctctaatgttaatcctgcttgggtcttagccttcgaacccagaatacctgtcttgtgttcctgttggatcagactctggtatgcctcaaatttgggctcaatgctctttttcctatggggtggtatggtggcaatttaatgcacacccaaattccgaatttccctgagcaatctggtcaccaggcaggggattttgtacatgtggctataaaggccatactgtcacatcagggaaaagtaaagaaacatatctcttcatccttgtctgaaatctgccactgtcagactgtcagaagtcacctagcccacctcagacacaaggctgggccctcacctgtcttgagccgtgagtcctttaaatgtcctcagggcacaagaatatgcatgctctcttcatctgaaattgctagtcaagaaagaagagtatcattcagtctgcaagtctccagttctgtgagtgaaggtaagctctcttttcatatttatttagagattctggaccacatttgaaatgaactggcactctcaagcacttggtcatctttctccaatctctctccaggggtcatggggtacacaccctgccaacgcctgtgctggggcttaggaaagagtttcggatatgtagtctgtgtgcccccagagagtacacacttatgtgaaggtgagtgtggcggtctgctaaagggacagagatctagactgtgcctccatttcctttgtctccctttctgaccccatgtatgtcatggtaataaactatttctggcagatggatttggatggtgtctttttttaaaattgtgtcaactacgagtcaatttttggctgtgtagagtctggtcttccttgggggaggatggcagagcatcctaggttgttcctaggttgttcacctaggttgacactcttcaccggtgcctccccagcctcctccagccctttggggttagtcctgaaattgctcagtctttgtgaagatgagacttgaaaccctcagtgattctggatcttttaggctcatccaagaagtctgtaccaaggctgatcttcagttctggttttcagtttcccaagccagaaatgccagtactcttggagattcctcattctttatgggggctgaccaagccttagcatggattcagccgttctctccacctaaactatgcagactgtgtgggtcttttttgtaacagacttggtttagcagaacacctgtggctacgtacataactctacttttcattgctgcttcttggtctctctctgagaccacaccctaacactctgatttgtggaaaagctagtgagaagcctatactgagaatccttcaccttcccatccaggttgagcaaatatgctcagtttatagagatgaactaaagtaaaatttacaatgttgttgcctttatgataaatctagaaggtcatagtcagaacaccaaagacaatcccctaatcaaactgcaatcaagcttagtgaatgaaatgagatgaaactctatatataaactacacatggaactagggtgagaaagtataaggcaaattcttgaagtctacctttttcattcaaaactacctctgtctcttaatagacatgacttggctggccatcttggagagcaaattaaattcctcttaaaaattataccaagtcattgccctgtcaaaaatacctggtattctgagatgaatttgctttagtgttaaccctctgcaaataaattggagtgacccttgccagactgacacggtttgcaaaattgttctcttattatatttaaccagcgctgtctttacctacttggtagattggaagtctcatagttagagaagctcaagatgcaaggctttccacatgtggccctttaggcagtgcaaagagggtttggggatatgacctggtgggtaagaacatctacttatgcttatgaggatccgagctcaaatcactaaggggtttctgaaaagctgggcatggtctatgactccagagctttggggggatggagacaggaagaccactggcttgcttggcagccatcttagctgtgggcttagtaagagactccgccttaaaggaataagtcagagggtaagaaagcagggcacctggtcgtctctcttgatctctgcttgcacatatatcacacatgcatatatgagaaagagagagggagagagggagagagggagagagggagagagggagagagagagagagagagagagagagagagagagagagagagagagagagagagagagagagcaagctacaaagggtgcagatgggcatatgaaacaggtccctgtggttaactcagctagctgatgtcagagaggccgatttagactgtgcacacagacaagcagagtagatgctcattctatctcaatgagccaacagaaaggcagtaaagttcaggttaactttgtgagtggcaggtgtaattataattggtgatgtaccttacctttcaaattttactcaactacggtaatctcacacatctttgcttttcagttcttaatccaagatagatagatcccctagtggatctttctcaatgaggtgtttgactcctttgggtctttattttccttatgtggtctctatgcgaagagtcatttggatcatctgcagtgatcaccatctgtatgagacagcttgtcctggagcctacagataaagagaatcagattaaaaagggttcaaatggagcaccatcattccagtgaaagatgctaggaagattcaaacaaaggaggacattatagcaggacttggttgagatgtctttaatgtcagtgccttccggagacaagtaatcttatcctttcaaaggtccatgttctgcaaattccccacctcctaattctgaccctgactctgcaggtactccttctcctatgcaccctgatttttataacacaaagacttttttaaaaaaaatgtataagcagggtctcagcaggtagaagcatctactacataagcctaacaagtggaacttaatctctggaacccacattttaaaaggcaggagtggtgatgtgcttctttaaaactggcattcctgtggtgagacgggaggcagagacaggagaatcctctaatagcacatgggccagttggtcaaaacacgagaaacaagggaaactctgcctcagcatgctgcgaggtgagaacatgctcctgaaagttttcttccaacccccacacctgtactgtggcatatatgtttccatacacacacatatgacacacacaaacatatgcacacacacacacacacacacacacacactaaatagtttttaaaattgcgcaaccaagtcaaatgtgcccttcaaggtcctatgaatgtcaatgtcactgttgcttgctcctcctctctcctcgataccagaccaaattctgaatatataaggggtgaaaagaccttatagtgtcagcatgggggtcaggacgcatggatggcacaaggcagcagtccctgctgcttccttctataatttaaaagaaagttggagagacagccgctctcaaagctccgtgcatctgcatttttccagtggtattctgggaaaggatgactcacacgtggggagatatttattcctttgattcatgcttaaatgctgctccttcttatgcttcagttacgtggattatgaatatttaatgctgcatatactggaaatgaaggtcaggtcctgctcactggcaacttcaaagcagcctccattctgaaaggcataccacctgctgttagcagaggaaagcagaaaggttatgcattgttaaaaatcttccttaatgactctatctgcacccaaatgcctggtgcacagttggggctgccttctctggcttttccagcttttgctcttggattcttgtttaaggcttgccgcctgagtgagtagggcatttggatggtcgaggaaaccatagcacaaattttgtagcacttcctgtccaagtgctccaccgccaggggaatgaccacttctcagtcctcataaatttcatttatttgttcattttatattcattcattcactcattcattcatttattcactttcacagcttcaatgtgaaaaccttaaatattttccaggtagtgacagtgcttatggttaaacatagttgcagataattgtacataaatttgcagtagaaactgaccagattgtttccatagcctctggaaacacaagtgactctgttattataattcagaaatccagagccttagcccaatctgttattatttcacagttttaccttccactactcttcatatcttatctgatatctctgctttcatccgataaattttctttctaaagtaaaaaatcaggggattagaagatggctcagtcagcaaaatgcttgccataaaagcacgaggccctgaggtgagcagcaatgcaaaagaactgtgtgtctacagtcccagtgctaggtggtaggtgagacaggtgggtccctagcatcctagccacctctttgaacaccaggttaaagactaatgtctcagagaggaaagtgggaaacaattgaggaacatacttgattttcaacctctagccgctacacatctgagtacatacacccacacagtcagacacatgcatgtaaccacagacacatccacacaaatttgaataataacaaaaggctagaggaaatttgtgtccccattgttgggctgcatgtgaattagaatgctcagcacattacagaaagtattaatggcttcttctaatccctagctggagatttataattcccactttactgactagaagtctggaaccctaaaatttgcttcaaaccatatagctaacaagtcctgaagccagaatctcactctaatgtgccaccagctcccccagtccccgctgtcacttgtaaatgtcaaggaataaacttctagactggagaagttctagaaagagcttggtgctgctttgtcctgtcaagtcctctgccttcttccctttgtcttctctttcccccattctcatcctgagagccaagtgtacaatagatagctcttgggagagccccatcaccatcctgtcccctgcatctgctgtggatcacagggaagttgatggttgtttctcgagagtcctcatacccagcggattctttctaaggaaggagtctccccacccatccctacctgctctgctctgcacacagaagcaggtaggagagatgccttttccctttaattgaatgcattcttttatcctttagagagttgcaaggcttaatcttttatagttttgcattatattgtgtaaaattcacaaatattattaaaacaacagagtataggaaaagtgggcccaaaaacggtttgttggaaggtattaaaaaatgattgaaaagaaaaaaaaacaaactagcctctttctttcattacttttgttctaagtcaccatgcacagatgttgacttggtgcctccaatgtgcccaactgcttggccaaccacttggcagggatgtggagacagcatacatcagggttcccttgtgatcagtggtagctttccctttcaccattatgtagccttgcagcatgagcagctgggcagccagggcattgggagaaagcgcctgggcatatcttagctgttaacttcctttaatggatcagggtcattgtaggtagtgctctgaataattagctccagcaccccaccttcttgctctatttgagaaggcacggcatgcacttaacctttgttgaagaagtcaacacaaatcacggtgcgtgcaaagcatctctttcttctcctcttttaaagatactccccaccacaattttcaccatccctcagtgacatttttattgccaggctttggtttggaaaattatgggtagggaaagttcaagggcagggtgttcagaacagcactgcacatctgtgtgggggaacacaacaggagagccagcagctgttgaaagaatagagtgtcagatggtagaggagctgagccactgagggatggagacgggctgccttcagggtagatgccataaatagctcccaacgggagccttcttttcctttcagaatctagcctctcatggcacctttgaattctgtgatgtgtaaggagcgttgacccagtctttctgcatcatctagtttttcatgttgccattctctcattagtagggataaacttggtagcaaagacaggtagaaatgatacagagggataaaggaggcacattctttacctgtctgcttccatgtggatggatttaggccacagggtctcttctttggttatataacactagattgactttattttttctcaagtgttcctcctcaaccttccatagcactaagacagtctctgtcctcactcatccctcactgtgcaagtggtcccataggtaccatgataagatggcatcttcaagtgttaaagagtgtgaatgttcctcaggcagcttattagaaactataggggactctactgggagtgagaggagtgaatgagatagacctttcaggtttgatagcaaagacaacttgggaatagagttctcttctatatctgaggagtcaaccaactgtggattgaaaatattgtctaagaagatcccagttttacagctcatacatagatatattttgttttcattactctctgcacaacagttgctactagtacaacattgacattgtattaaatattatttataatctagagaatgtaacgtataaggaaggatatatctaagttatatgcaaatgtgtcgtttcagataagcaacttgaaggtacgtggatttgggtattcatagggaccccttgaaccaatttccttgaatacaaggaaatatgttgtcacatcttaaaaatcccttggtaccactaatctctgtgcctgagcatattctcccttaattgcaggtaaacctggcagaaaatataggtggcgaaggtataaggggcagagatgacttctttctatgtcttttacttctccataggtagatgtaaaggacaaggtctgttctttggttgtatgacattaggttgaattcatttgtctctcagagtttcttcttctaccttttagacatgactagaggttaaaagtcacctgctaaaagtcaccaaaggaaagtactatagtcaaaaaataaagccctttgagataaagcccttcctcttgatcttttgtgtcgtttttaccaaatttaagccatgagcaaagatgtcttgtgatttactgtctactaaaaaaaaaaaaaaaaaaaaagcacattgacttttggtgccaattcaagactcttaggtcttcattgaactatagactttcatgccaggagaaagtagatataatcccaggtggagcggtggaaaagattaaactcagacagaaggactttggggccagttagctttgtcttcactggcaagaggccttaaactctttgatcctctctctctgtcttgctctgtctccttttctttcttctctcccttcctccattctatctccctctcctttccttccctccctccctctttctttcctcccttcctctgttgaactaacttcctccctccctccctccctccctccctccctccctccctccctccctcccccccttcctcccttcctccctcccttcctccctcccttccttctttcctttctcccctgtctactccaatctgtccatatgtctttctttcttttcttctttcccctgcccaccccccaccctcacttcagagttggagacgtcagcatgcagctgtattgtggaaagttgacaaggctgggtcattggcttcacttcttggcatttgttaggcattacttttgagaacactgagcccaatggctcatttgctttccctgtgaaaatactatcttctaactatgcctataaatccacattccccgacccttcagaattagagtgggcactttctgaccgcctcaccattttccaggatttagaaggaatgttttggatgacccagcactctcttagcactttgacaaccctttaagtgattgttttgtttgagagcaagtgaaagaatgcattccctgttagatccccaggtgttctgtggttcactttgagtttatggcacaggcttctgggttttctccccagtcacatcttaccctattactgtccccaaatcacagcaaaaatgcattcaataattgctgaaagccagcgtgggatccagttggaggcaaactggctcagaatgctgcaaaccaaacagaagggcagtgctcatgacaacatagctagccagggtggcactaggtggcagcagatgttacagcttcctcttgggatttatgagctgcaggacatgcgacctctctcttgtctcttaccccttgtcctctgtcctgacaacttgaaagattgtcactttggaaagaccctgaccaatgatgagtcatctgtgatataaaaatagaatcctttgcagtaagaatgcccttgggattttttgatgcatatgtcatttttcaaaaaatttgggaggttggaggctttgtgtatatgtgtacatgtatgtgtgtgtgtgtgtgtgtgtgtgtgtgtgtgtatgtgaacatgtgcttgtatacatattaagggtagtagtgtataattccaatagagtaggatatagcaataggggcattggccccaacctcatcacagtaccagacaggatagactctatacacatatgaatttaaacatatcaatcaattaacctattgaatgtcaaccatgtttgatagtggaaaatactgaatagcatggctaagtccagatttttctcatcatgatgtttaaattgtatatattttgtaagaggtagtccaaacttcaaagggaccaaacagactaataaagagatttcataaggcaatatattctaattgccattccactggcgctaaatgctggaggctgataagctgaaagacatccccttacaatggaatgtttggctctcggggatatttccaattgagagagaaatcctccaaaaattcctgaggggactcttactatgatctgcacattggtctcatgatttttattttcagtaaatgaagcaaaaccctgtcttgaaatcacccttctaagagcagtgattggctttagccaggcaatggtggtgtgtgactgtgagcccagtccttggaaggtagagacaagacgagcagaagttcatgaccagcttcatcaacatagtgagcagaagttcatgaccagcttcatcaacatagtaagttccagaccattctaggctacatgaacctctttcaaaaatcagaatagggctggtgaggtggcttagcaggtaaagatgcttgccactaagcttgatgaactgaatttgattcccaggatataaatgtttcaaagagagaatcaactcccataagttgtcttttgacccccccacattcaagccatggcatttgtcttagtagttgtccaacatctcctggtgattctcctgggctccaggtgctcttgtctttcagattcttctttttcgtaaagaatattaaaaatcacatttaccattacctttatatgagtcaagggtaaccaatctgatctgcattaattatcagtattataactgcttacgatttgtcatttatttcttcaacctaacattaagggaatgaatattaagatgtgctttaggtctttagacatatgagcctgccatgtctgatagaaaagtgggctgtgttttctccaccctgtcctttctaccattctagatgtttccatggttaaacaagcaatctcaaatacaggtgtcatacggcatactcatcccaatgtcgtagttattacaaatatgataaagcaagtattccatttccagcctgtccttttcaatctctgtatatgaaaaggagtcttcgtggattaggaggtgacttcatgtctttccctgtttcagtaaagtaccctgaaaaaaaagtgactcaagggaaaacaggtggatttccactcacaagtccagggtacagtcaatcatgacagggaagtcatgtgaggagcttgtagcagttggtcacgtcatatccacaatcaagaagcagagggctgtgaatgcaagtgcccatcatcttcccgaatgttatagtctagatgcccaaccaaaggaatggtcccagacacagtgggcttttcctagttcagttaacctcatttgcataatacttgactccaggcccagaggtgattccagacctcatcaagttgacaattgagattagctagcagaagtctatgcaataatgaaaagctttcatgagatttcatgagttttcaagtttatatataccattattaggagctcttagaaatggatggggtagatctgatgaggaatatgaggtgctggggggtcttgggtgtctcctaaagtagactcaattgctgctaattgttcccatgcagaaaaatagactcatgtgatcagatcttgtgatgcttcaaagggaagggagaaaactggccttacaaattgaatctccaatttaaaaatactggccatacaactctcccagtgcccagcaagccaagcaaaacacgtctgcaggccagatcttgttttcagcctctactctaaactctctctttctgttcttgaattagctcagctccaggggtgccaggaaactttcttaactcttgcttcttcatcccccaaaaggtcctttctccctttaagatggagaaactttggcctctatgtgtctggggattatttctcataaagcacattttcaaacagtgcttaattaaatccccaattttccctaagcaagtactgtatgccatagtaataaatcagctaaacttactgtaaagccccaaagctacatatcataacccctacgtcatctctgaaaataacgtctttagaaccccataaacatactcctctgtttgtttaaggactgcaagggctttttaaacatggttgctaagtcacaagggagtattttccaggacataaatggaaatgagcataacccccttcaattgtcaaattctttatgagaagcccaaatctgtctattctgctagtggattagcttgaccagaacagacttaatgatattaagtgtgtaagtgtcaatgatcgctggagacttttctgccttatttttgctaaatgcacacattatacaaaggttggcttcatttctaacaaagtacatagaaagtacagattggtgtacataaatcctgaccacagttttcatcagcctaaaaataatgattttctgagtattgcacttaatgtttcctggtaattcttaagctgttgtcccttcagaaacaatggaagtgtgtctgggaaatttctccccagacacggtgcccagtgcaggcttttcgcttcaatcactgaacctttggattttgcatggaaaattggtagttcaggttagtgtagcaacaatctttgaatatggaagctgggactcagatattttcagaactagaaaaaaaaagatgataatcttatgccatttctgatttccatacagccatcccatcaggctggtttctgcatggaaaatacccaagcttcctttcacctgttgtcacacacaggaacaacttgtaggaagggtcatttactattggaattcaacttacccttcctgataacactctgtcctgtgtcctgagtccacaccatgatgggacataagtggatgctttctatagccaccctcacccaaagccagaagatgcagagattttgagatacacctgatcttgacatcccgaggaactgcagagacaggatgcagaaaaaggtgaaaagatgcaattaggagtctccacctgtgcttttcctgtagcagaagggagaagtgagccaggagtgcattaagggccatgccctctctataatagcacgggcaagaataatcaagcaagttctgtaaagagctacatcaataattgagacacgtgccaggcagcagcatggcttgctggggccttcaaatacaatctgttatcaggcatggataacactggggaagtaggaaaggaggctgtgcatctgtgtgtatgcacgtacacaggcttggaggagtcacaagagagttgcagccagcactgcagcaagtggaggcatagaaggcaatgtgtatagcttctcatgtagaatgctcatgacagtttgcaggtcaaacacacccttctttgggaattggatgctacaggaatgtttattggccaaggactctagcattcatccatggatcccatgccgagggcttcctctctcatagcctatttctattgctagtttactgcagtttcttccaccataagggtcctggaggtcccagagtctttgaacttaaaggttgaacaaagatctattggcagcccctgtcctttctgcctgcagactaagtccaggtgtcattctcttgtagcctaatgcattggagtctgggcccataaaaccaagtaagggaatgtcttgggttttccagctttccctactgccttcatcagcacagacaagaagagccatagggtacatattgctgggctagtttaagatctctttgctttctgcttctctcctggttgtaagcttctacattattagaagacaagatcctcctttggctgtgatttgtgggcaaccagcagctggtcatatcacctgagatcctcgtgctatgccaagacccaggcagcactggatgcaaacagatacaaacagctgccatttctccatgtagctgtatctactaaccaccctgatagagaaagaggcaggtttggggagtcactggggatgcctgttggttcatccacaaggcttcagaccaatttgacaggaagcagaagagcagctggggctgagaggcccccttcttccacgaattccccgcctcttccagattccttcctgtcctcacctgtctccaagccagccagctgtgacagtttaattggtgtggggaaggagaggcagtaggaagcaggcaggggtgaccagtgttctggaagaagaagactcctctgggaggagtgcatggaaccgtgacagacaggcctgagagagctatatactggcaggtcagggagcctggctcctctgaagtaggaatggtttttcagactcttcctctttggactggtagacacagtgtcttgcattccaatttgtttctcagtgcccctctgcactgaggcgccaagagctaggctggaagatccctgcagaagtgaagattagagcaaaagatgcctagtaggttagcagcaagactgagccctttcctggctgaattctgttctgctttatgttgtgcatccctgaacagacagattaaccctttcaagatgtaggattttccctttgtaaaatggggtgactgtagtgacaagggatagaaataatggtgtatgcgaacgctctcagcacaggactaagaacaagggttgctcaggacattagctgtgtgttgttgttgttgtttttcttaattatttttttccttggtttcattagggaaagacatgaagagacaagaactatatacactagaaagtggtcacagtgatcaattatggggtagtggatagtactgagcttctgaaatggcaaatctcaactcatacgtggttcacaactggaacagatctcagaagagacagctgtttcacaaaatgagactgagccaggaaagacccaggcccagccaagagtgtgggatggtttcatgtacctttgtttcagttatggagttagttagattcatagatcccgttttctgatttgtgatggaaaacatttccgaccttgggattggctaacaagtagcctgagaaacgttggtttggagtctaaaagagagtatgccttctcagctccaggaatttagggaacctttgaggaagaaggcaggcaggctagcactgggtccaaagctattgggtaggattatctaatacagaaccagggaggggtaaggctagtatccttagactcttctccgctttttactttaactgtaagttagggcaagggggcatgccccaaactactttcagcattaataattcactacaagggaccccagaattcacaaaaataactgtattcatggtgacagtttattacaggggaatacctaagatcagtttggccaagggaaagaggtgcacagggcagagcctaggaaggttctgcaccaggagcatggcaccttcgttattcacatgtgatcacatgccatccatacatgcagtctgggagcccagctcagcctgagagctcagctctactgggcttgactgtataaatctgggtgtttatatccatggctacctgacctcagtttccacttgctttcccaagatgcactgttacacattccagtgtgatcagccctcatcctgaatcagctcatgaccatctggttgccccaagaccgcaggtgaaggcactttgtagtcagttatggcactccaagggcttagaaaatgcctcccagaagtagacagcaaaggttggagcttcctttgaggaaaagctatgcctatctatgtaagtaagtcatgtagcaagtcctgtatagacttttcctgggaagtctgcaattggcctcttctaccacttatgcaaatagcagaaaaagaggggaacccagtctcctgaacttcagtgcccacaaggttttgttcatgtgagcaccatcacggctggaaacatacatggcttaatccagccctttaaaccttatatacctatagacaggattacccgcaaagggagcctggagcaggagatggggagaggccagcctgaacgtatgctctggaggcaggaagtatcctggtcacagggattccttgctaaacaacccatttgctgctactcagaagggatgaggacatttcctgtgccttgtttctctgcagacctgatggatggttctctagtagccctcaacggcgttaaaggataatacctgtctctctacttcaatttaacttctgtactgtaagactggataaggtcaaagccagataactcttgagctagggaataaaaaagcagattaagcctgtcatcgggccttgctgtctctctgtaacctgacctctaaccagggataattggaacccaccctaatgaatgcttaatgtctcacgtggatgaagctatgtcctaatatttagagatgcaagctgatcccaggaaaggagtgaacaggctgtggttaatgtctattagtattcattgtgcttgcgaagcttttctatgcagataggtagatcatcactttgcaattcattagcagtgtgatcttgcgttggtgtcaactcctctgacattcggttgcctcagccatcaatatggataataactcattactgcccgcagggtacttactactgagcatgtggagcactaggtagttacttgtgggtatggggcacactggtgtttattaaactggatgacaatagtgacacaaacatgagtcctctcatgtggagtgacctgtcagcacctggttctactgtgcttcctctcaggtggttttctgccatggtccataaaccagacagtggaaagaacattttgttggaaaggtctgctgaactctgcattccaggacacattttttaacttcacgggatcttagctttcttggttgcgcaataagcaagtttttcttccctttctctaacattcctatttcatctctcccccttgagatgtgtcttattatagtgaaatgtgggttctcaggcaggatgactggccacagaccatcactttgtaattcattagctgagtaatcttgcgttggcgtcaacttctctgaccctttgttttctcaaccatcagtatggacaataatttattactgcatgcaatgtacttactgctgggcacctggtgtcataggttcttactcatgggcatggagaatactaggtacttattactgggcacagggcacactggtgtttattaaactagatgaaaatgatgacaccaacatgaaatcattttcacaatgacttacacatcagtagtttggtatcattaatctttattttcattaagccggtggtttagctcttgtttagaaatgactcacaacttagtagctcaatgtttattgaatagctattatgtgccaggcactatttgaagctctcagcccttatgtgctagtatcagaggggaggcaatcgacaaataaataaatgtcatgatttcatcgatggtaaatatgaagaagataaaactgataatgaggaaagctagatttcttcagtgtttttgtgtatgttcaggattcctttagaggtctaatgaaatctatggttcccttgtcagagcatttttaacttacaaatatgtatcatacaaacattggattacaaggaaaataattatctaactatgcagttattagaatctaagaaacaaacttatgcaccgtgcttgtttttgatgaggatattttttaccaatagctatcaacacttataacacaccagtgcatctcatcagtagcattaatgtgtttgaagagttatgtcacattagttgtcttatccataaaagatatgtgggattctattgtcatcaaagtcatttagagtttccattggttgtctctgctctgtaaagggggatactacagatttgggtcgaaggataatgaaaaaaaaggtgcggtttttctcattcaagtttgaggactctctcaatgaaccccacaaactgctgctctgtggccaaggtcaggaacccagagactgtagggctccttgtgctctggttggaattctgacttcagacagatgaacgaaacaattttcagcttctaaacatcattctagatggaagtgttaatggaatcaacttgggaatcaagacatgaacccgtattgctatagttggataccttttccaaacacgtaacaagatcctctggtggggtaaaggacagcctgtggatgcacagtgctgggataacttggctatctatgcgtaaataaactcagacccttactttataccataacaaagtgaactcaaagcagactggagatttcccttccagaacaaaacacaggtttgagcctttgttacattgggtttgacaatgaatctttgaacataataccataagcagaagcaacaccaacataatagatatatcagtaagagtgaaagcttttgtgtatcaagggatcctatgaagaaaaagctgcagcccccagaactagagaaaatgtttgcagaacatgtatttaatgatgaatgtactgggctgcataaagagcttttctttctcagcaatgaaaaactaacctgattttaaagtggacagagctaatgaatagctctttctccaaaggagatgcaaacataaccaacaagcatatgaaggaaaatcaatcagccacattcagcttttactcataaacgaaatgcaaatcaaaaatacaagataccatttcacatttactagggcacctacaataaaacagatcagaaggaacacccgcaaggattcggacagattgccatccatgtgtgttgctattatgatgacataaaggctctggaacattcctcaaaaataatttttccatccaagtctttacctgggaacactgaaggcatatgtctgcactaaacttgtagcaagtgtttgtaatttctcataataactatgtggtgggaagtatcaccaacacccatgaatgggtgactggattaagagaatgtgagacaaaagtgagacagagagagagagagagagagagagagagagagagagagagagagaatgtgagatatccaagcaatgatatatgacactactataaaaagtaataaagttttcacatattccccaacacgaatgaacctagaaagcattatactgatgtgacagagtcgggcaaggtcactcatatgagactccattgatactgactctcaaggacaggggatttcatggaaacaggaatagattagttctggctgacggcttcagggatggtgttagcaggcatagcaggggttggtagtgaaatggtacttgagtttctttctgagacgaggaaaggattctacaatatggggtgtttatacaactctgtgtgtgctgaaacaatagcgccatatacgtcagcacatggattgtatggagcatgggtaatattgggttgatataagatagaattctggctgggggaaatgtaatggtaagaaaaatactcagaaggctgtctcattagtctttgctgggagattgatgcttccattggaagcattatggacaggagagcctttcacttgaaaattgggaagaaataagagagactcctaggttgtggagtttactagctggcagctttctctccaaaggcctgagtcttggttccactctgtagaagtattgggagtgctagatttaaaacccaaaatgtctgagtaccaggttaaagagttggtagccagcctgagggactactgggaggtggctagtcttctaggagttggatcttagggcctttgaagaatctatgaacaccctggtacctcttctctctgtgtgcttccctgcagtcgtgacgtgaatacacccactcccccaggcttctctgctacaatgtactagctgctactcactggaagggacagaatcaagagacaaagatgacatttctggaactatcaccagaataaacatttctttaaattttgtatttatgcttatttagtcgttgttgtgtatgtatgtatgcatggacacatttgtatgctacagcacacatgtggtagtatgtcagaggacaatatgtaagagtcacttttcctcttctactgtaggttccagggattgaacccagatcttcagtcatcttcattgtgttagctctatatttctccttattaagttgtctatctcagatattttgttacagcaatgaaaagttaacacagagaactagaggccaacttaaacaccagcagccccggggagagctattttggaagctgttgggataactgattccattgtatcatctaatagataatagataaaaacatacatatagatacacaataatgcacattttcacacacatgttcatgtatacacaacaatgatataaaagacagaaaccatagtcaaggaaaaagcatggtcctgcttcaccccaggctgtgactgttcatgcccatgttctgtttgttcagtggcagtagatctcagattaactaggaaagactcacttcaactctgctcctaaagtgtgcccatcaagtataggttccccagccacatatataaatggtaaagagcaggagcgtgcctttgcataggcactgaagaacttagatagtgtcagagaactaatagagaaaatagtcacatctcctccatccctgggtcccaagggaaagcctgccttggtgacttgtccatccaagtgtgttgaactgagttgcttggtgtagtggatgtaatgaaggaactctagacatttaaaaagtcatctgattgcacagtgaggtcacctgcttcatcctgagaagcagccaatctattacactccccaaaggcagaaaatacactgctggtagcatcaggggtgttcctagatcagaatccttctgcaggaatggatgggaggaaggacaggtttcccttgcattaagagcctggagccaaagaggctgggtggttcccagcaatgctgggtgatttatagccctcaatgtcatcctgattttcaaccactgctcccctgggagcctgtgtgccagtcccttagggggaaagagacaatggactgatttttaatggcaacagggccaacaaatctggataactcctgactgaacacaaaggtgcacgtgtttcttctcatctgaaaaaacatgcagtgtggtgcacacactgcaaagtgggacctaccaggctttgccactctgaagaaattgtgcacaccagtaagagagaaagagcgggcttctgccagttttcacatcgctctccttagcttggacttcaccatagaacctattctttgggatgggttcccatatcaaatcatggttaattagaaaatgaaaatttaatatgattattctatggtgcagttgagggtggtgaaagagacagtactggctgaggaatcccaaagctaaaccgctctaaccatttacagttgtatgctattcctacgtgggtttactttctatcttgtccacggttgtcattgctgctcaagttcctttcaaaacacacccttcttatttactgtaaaacacaaagctcttggccacaagcacctttctttggaggagtcaatggtgtctatattaccagcgatctacactttctacccagtatgacttctagccacccactatatctcagggatactttctttctagcatgttctgtcctaaaagtctattgtaaatatctcttcttttgagcctggaagataaagctgactcgtcaaaagtaagattgaactcccgctgtaaacgttagtctctacatgtagtgttggctgtaatcatattatttcttttaaagttagaattccgcatctctgaaaatgacagcaaaatgaaatcaaccagagggcagtttttgtgtgaatatatctcatgtactacacttggtggtttagaattgttccaagacttgtgtagtaatgttataagcatgtgtgactctgaagtgggctaagaactaaacacctatgaagaagacttttaatttggtcctaagagaatacatgctttacatgataacttacatctgactgttccttccaagtcactgcctgatgccaaaagtttaaaaccacagtaccatggaacccacaagcatcttctagaacttaccgaactcacaagccagaacctgggttcaggcagacattcaataattaatgaggtatattactttttctatttgtaactaattctctcctccacaaaaggcaagaatttagtgggggaaatctctctgcttctccttgtctccatggtcctcagattgcccagtattctgtttccagagtgttgacgtcagtggaaacagcacacacatagtaattatctaatatgctataaacaacattctatggtctggcagagaaaataatgccccaggcaaaggggaagttgaattatgaaaaagcaataagccttttcataattacacactaagaaagagaggtctggtttttaagctaaacagaaagtgccaagggagcctattttgaagtgaggaagatgccccacccccacccccacagtgacatgcaccatcccacctctgagcaaaatggagaacacagtcagtctctcattgtacatcctgaagcacgggatggtcgccagagcccatcaccttttccgtggaatctcttgggtgcagctatgactgatacttctatgctagacacgtcccgtcttgagctgggcaagcaaaagatgaatgagtccccatggccctgctgtagattacttagtgccagttgtcagttcttctatcccagggaagggtttgcaatgagactgttttcgacagactgtccatgataaatgattttcccagtaagaaattgcttttctgctaaacctcacccaatcatgctgacaaatgtctggctatagagaaccctgctactgctgtctcagaaatggggtgggggtgggggtaggtagtggctgggatctgaagccaggatgggccaaataggaggtcttgtgggtgaagacaaaaagaggcaggggatttgggttctgacgtatgtgtttgatcagctcctatcagctattgctgagaaacgaccagcagagttcagaatgttcaagatctcagagaaggaggcggcctcaagggctgcgtgtgcctctcagttctggttggtggtatttccatgtaaaactgtgtaggaacgcagcaactgatgtcagctataaatagaacagaaatgcgtacacatagcaagggcaagaacctccaggcaatgttctcaacctgtcattagtctgtgaccctttctgaaccatcataaaaatagcatgccctcctttaatattatttggcatttcaaaagagattaaaataccaaatctaaaaatcttaagtgactgttagaattttgtcttttccagctgaacagagtctctctttctcttccacacactaggaggagaggagtctgttgcagtggcagttagatgttacatgttgtgtgtcacttggcaacagaggccctgaggccctggcaggttaatacctgtagacttagaaacctgggttcagggttggtgccattgtagagttgttatgctagggccttggtcctgcgagaggggatcatagcactatcagaagggacatgggcagtgccagggtcagtgttgcagtgctcctttgcatccagcctttatttcaatggcctctagtgcctgctagctcttggtccctgccatttcctgagaccctgggaaggacaaattccccgagttgctcatcccatggcacaggctggtctttgagctgtgacttgaaggctaggttcagataggcaggatgactttgctgccatactaaaacgtttgctggggagaaagaggctcctggagaagggggccttactagtttaccctagaggattactggggacactagaattagcttttcctgtggttttcataaaagggcctcctgggaggttcctgctttcttccataacacgggaaatccccttgagctggtagaaacaggtgggccatgctccatttctcattttttttttctggaaaaggccccatctttcctttaacacaacatgcatcccccctgtccttcctcacattgctggcttcctcctgctgcagggtaccacaggttggccccctcctctgtctctagacaccatgagaaggagcttctgaatgcttccccagccttgcagcgctctgcataaatagctcagtacccgtttgctgtgggtttgtttttggcttcttcctccatccattcatggcacatttactaagcctgagcacatatcagactatcccgggaccagagaatagacagacagacagacagacagacagacagacagatttttctgccatctcctctggagcttgacaagaggtagcattggtacactagcaatgaaaatgtgtttactgtcccactacagcccagtatgtcctaatccacatcttgtttccttactaattcataaagcctcttcgtaagcctgcgaggtgcttctgtaagaatcagactgttctaggtgagaaagtctggtaaaggaagataaaaccagaaccatccaaatgatgggtgacaccaccagagtctgcatcctgggaactctgccttcagagactctgtgtcctttgtgtgggactcctgtggcaactgaagggagatggtcctgagtcatcattggatggtgtcctggtttcctcgttgtcggggagcagcctggctgtcctgatagtcggctctatctctctgcagtaaggtttctccacacttgatgtcttgtcccttaaagacctaaataactatatgagcttgcctgtgctctctatttggatccagggacttggacgctgaactgcaaagaagaggcgatgtttaaacccatgggtccatctgcatcctccaaatggtactttgaaagtcagtcatgtaaagtagaaagactttaagggaccatccagaagaaatatgacccctctatccaaccaggagttaggagtaggactgggctacttcttgctggtcacgaaaggaactggaataattgacatctgaatttgaatctgaaactaatcacagcttcaggactcaggtgtgtctgggtccacaaaactaacatgcacacatactgcaaataaaaggagtagggtgattaagtttggctggtctctgaaaggcaatcatgtccttaagtagtcatgaacatagcaccaagcacatagcagacatgtgatgggcaaaaagctcacagccttctgggaccactaagcttatgctggccatctgctttaggaattctctctactagatattctggaatggtggcatagtatagtaattcataggcccttcccaccgtgacttaatggatctctaggaagtgaacccgtaccaccaggactcatgctcctcagtctactttgtatatgatctctgcttgatgtcagtgtattccttttgcactgtgctaattaaaaagctgatcttggtttgctgattgacacctcaagtgaggaagggaggggatcttgtggccagtcagtgtgagagggagggcaaaggatccatactggaggctatgaactcatgagtagtatttgccttggcagaggctccttagtcccgagatgcctgactcctgagtttccagtcctaatgtctgtgtggctaataaaggaagtatctgtagagttactgttctgggagtctcacttttggctgagtctagacagatcttcactttcctgcacttgtactgtggtgaaatagacagctagctactctagctgaggagtgagacttatgataaggactttaccactgaaaatctagatgttcaagagtcatctgggtagcatctttgtgagcaaaccatagtggttagtgtcatctgaaaaggcagcacattttggtttacatgatgagattaaaagaaaaacccatacccactatatatagtttccaaaatggtaattctgtgcaaacaaagagaaaccctagcattgtttcaatatagttaagtattgagctagcacacatcatactcgattacaagatacagtcagttatagagaggctggcgcgcatcctaagtgccctacctcactcagctcctcagggtagatgctcatttttcctaggggaaggagcaactttacccctggcagtggaaatgtcaaggacaaggcactctggtctcaatgttctcctggctccatctttctgaatctgagtcctggtcaataaagtaagagtcagtttatcagggttgtcctagaatcattgcaactgtgctggtaggcccagccactagaggatctagaactttcccattgacattaagtagccagctaccccaggtgaacacaagctggctgctgacacaggatcaactgggccttacagcaggtccctggaacctagttatgaaggctgtcctgggacatctttgtgcgtcgtagggcaatgtcagagtttatttgattgaaatggccagacctcgtttgtaacatgttgcaaggagaggcagagtaagggaagaagtaggggctggaggctgattttgattaagcttgccatttcactataaaatctataaatgggatttaatacactgtgatgctcaaagatgactctttattttcttattcttatggatttctcagaggattaagcagttgtcgttgtagcacagagacctgaatctttcacaaagcctctggtgcatttcccagacacaacagcttctttttggtggctgaacctagagctgcctcttcctgtctcccagagagaagttttcactccctaaacactgtgatttgctttcttgtgttttctataattgccccacaatcccgtggtccatggaggccatgttcatcaccaatcagaactatagctcagagactttatgacatttgtcttgtcacacagcttggaagtgtcagaactgaaattcgaactctgacattttgtggctacaaaccccaggttctcccaggctgtactataaatattcttggatacagagttatggtggcataggttaatcctttgaagcttaatgctcttttctcttctttcttttccttcttttctttcttctcatttgcttgttttagtttttgagataagagattctctgcgtccccttgactgtcctggaactcactctgtagaccaggctggccttgaactcagagatttactgcttctgttttcctgagtgttaggattaaatgtgggtgctgacaccacccagccaatgctctttctttttaagatgtctgtattgggagatgttgaactctgataattgaatgaaaatcttaaattctggatgtgtgtatagaagggaagcaaccgcaccccacagttttgcatgctttccatggtctcttttttatttgtttgtttgtttattgagtgtttgggagactcttttaagaaatcccttccgggatcttaaggagtaagaactaagcagtggggaaggaagaggaggagggcaaggttgggggaagaaggacagaaggcaaaggcaggctgggaagcacatagcaaggagtagacactgctcacactgtgaacagttaccatagcaaggagtagacactgctcacactgtgaacagttaccatagcaaggagtagacactgctcacactgtgaacagttaccatagcaaaggagtaagcactgttcacactgtgaacagttaccatagcaaaggagtaagcactgctcacactgtgaacagttaccatagcaaaggagtaagcactgttcacactgtgaacagttaccatagcaaaggagtaagcactgttcacactgtgaacagttaccatagcaaggagtagatactgctcacactgtgaacagttaccatagcaaaggagtaagcactgttcacactgtgaacagttaccatagcaaaggagtaagcactgctcacactgtgaacagttaccacggtttgagcctcctggctcaaggactttcttttcaggtcacttgctagagtagtggtttatatatcgtttccttatgaacccagtgacttatcctaatttataagccccctgcctatccaactctctcttaagttcagtgcccgtgggaggcagggcgtaggtaatttcattgagtttcaccaggcctttgtgggtaccacccacttgccagtggcctgtcagtgactcttccacccctagttctctaggttgtatggaaaggctcctgagtatgggagctgtttatgcacagagggagactctggaaggtgtggctagtatataaaaggactatatttaagagcatggatgattttatgtttgcaaactttctatcccaccatggaaggaaggggcagacatgatcaacctcattcattgtttgagtatttttttttctcagtgctatgacaaatgcccagaaggagcaacttaaaggaagaaggatttatttggctcacagctgcaggagatacagcccattgtgacagagaaggcttggtagtaggaatgcaaggtaacagagcatactgagtccatagccagggagcagaggaacagggaagaaagcaggctgttctgcatgcctcctgctttctttcattttgctcagtcttgtgacctctccgttcacaggatggtgctgcccacgcccagaatgactcttgcttactaagctggacatctttggaaatgccttatggaaatgtggagaagtgcaacttctaggtcattccaaatccaatcaaattgacagtgcgagttaaccactttcctccttcattttgtgtgaggagaacgtaccctgtgacagacccctcttacagcggcccctggagatgcacatgatgacctgcatccctttcaagtttcctgtctaatgccctgatatcttggaaacgtgttaaaaagaaaacactttcccaggcctagttctaacaaaggcagcccttccatctcagatcctgctggccaatttctagagacaccgcagaagagacctgaacccatagagagctagaggggcagataactctgacagccagtggactcctgggtctggccttaattaaggcagagtttggaacaactcagcctagtatcaaagcacagctttagtgacccaaaggataggttatttacctctaagatcttcaccccaaatcccaaaacctctgccagccatggccacagacttctaattcttagcttcacattcttttcacttctagaaagcatcccccttggttccccttttggttaaggaatatatttgaagttttaaggagatgcctgttatgtatagggtagataggtaaaattggcaactgtttataaaacactttggtgccgtgatatgcctacacaccaagagcaccagatggatatggagtgagtctgtataggtgggtgtcaacctaaaagagaaaaagaactaagtttaaaacagaggttgggaactggcacttctcagtataaatgagttgggttgctttttttttctttctatttcggttcaaaagtcagcatagcaagattccataacaatattcttgtttggtttataatgtgagttagtttgtaagtgaatctcatctgtatattatatccatggaaacatctccgacacacatgcctgcaatatctgccctgttgtgttgtgtttagatgtttctcttccccccgccccccatttattctgggtcatcatgaagcccttccatatttttattcttatagctgatttagagaacagaactcacttggggaattcaaaggtagccaaaaaatattcttacaaaagttaattaattaaattaaaagcagtcaaaagaattagtcacagtagtacgcaccctgagtgctagctacaggaagggctgaggcaagacgagcttgtgaacccaagaactttaagctagcctgggaagtctaaaggcacactgtctctttgaataagtgaataagtaaagaaaataaatctcttatgctgagtgtctgcttgcaggtcagcctaccaacgttttgtctcttggtggtatataaaataatacttccttttttgcttagtgctgacttcaattagtaaggctgagtcattttgcatttttaaaagctgagcagatggttatatatcacttgattgtgaatctctgggcatcacagaacaacaacaataacaacaaaatccacttggcctgaagccatttcacatgacattggtaacaaagggacaaagggatttgtttgtttttttaactaggccttggggcattaccaccgaacctcctagaaggaaacttcttggtttttacagctgtgaaacttattaaggatgccttataggattgtagagtgtttgaaaattacctgattggatgtctagttctgtgcacaatcttaatctcttccctaatctccttccttttctccatttacctgaccgggccctgagattagttggttagttggttctttcattggttgatgtatttgacagttctagacacttatatcaccatacatttttatacactccattctcctccctctcattccccttcctttcctgctggaaccacttcttatcagcaagtctccctcctacttccctgccttctttttgggtgtggcccacttttcctgttatggagacagtacctgacacaagcaacccaggactttagttgagctcacagtgttagcacagagcaagcatgttggctgatgtggccaggatgtttggtgctggggtataaagcagctgatcgcactgggagacaaacaggaagcaagaaggaagtgggatgaggtacccttcagtgtcttcacctagggacccaatgtggattaccatgtctctcactgaagagctccacaatctcccaagacaagtctgtaaggaacattttacactgaactgttaacagtgtctgttaatagtgtctgatgataataatgagagtttttaccaatatttaaaagcagagtgaagcaggaggaacctgggtgggaacctgaggaggaacataactgaaaagagcgagatagccagcaggagactgctttgtggaggaggaagtggccacctgccaaaggctgggaagacaggcactcagaattccctgtggagtttgccacatggatatggtcagcatccctgacaagtgaagagttagtgggtgacaaggtgagcgctccaggcaggctgaggcaaggagcctgtgacagtcttctggaaggaagccactgtgagtgttggctccagagctcagtagcaactctgatagtgaaggctgaacacccatttagggaggcccgacctctcatcagaagaaggaaggatagaaggtagtgcctgaaaaatatgagtgcagggaacagagtgaagcttggtcccggtggctttcactggaattatgagctgagcatcagctgagatggtgatacagggagggacctggaagaggagagaagcactgtgctttcaatgtgatttgtcccctcagagttcctgtgttggtagtttgatctttagtatgttgatgctgagaaacggtgagatgtttcagagatgtggccaagtcagaggtcacaagatggaacacttcccagttctctggctttccctcctgatccctctgtgtagcccattcttcaactattgggatcccaccctccttaatgcccttaccagagtaagggagaagccagagtgatgcctggaacctctcaaacaataagttaaagagttgatcccagactctggtatttcattatagtaaaaataaataaattaataaataagtgcaaagaaagaagaaaaatgaagactagtagccctggaaatttgaaaagcaaatcaatttgagaaaaaacaatagcagtctgaccattcttactgaggaacacactgaaaatgaaccctgtcatttggcccatagccctacctggaggtatacagctctggggtattcatgcagcacaggggaaaggtcagtggactgcagaaacgtacaaggaggctcagaatggggagtaaggctcagcactgagggctgccagccaggggttctctgagctattgcaagtggacaacatgagcaaaagaatgcagcagtgctaaagaatgagcagtgaggaatgtcacagttgctgctgctcacctgaaccagactggggagcaggaagggaaagatagcctgcagtgaagttagggctcactgccaattacaagactaaaggctgagctagcacctttctggtggtctgtctccatttgcctgtgaagatgagtgtttgtttgccaaagactgagcccagtgcttcatcctcaaccatcattcctatgcccactaataattgtgtgtgtgtgtgtgtgtgtgtgtgtgtgtgtgtgtgtgtgtgtgtgtgtctgtgctcgcgtgtgcgcgcgcttgctctctctcgggcgcatgcatgggcgctgtcaggaaatattttgctacctgttgttttgttttgtgcctcaatgaatttatttgaattgagaacagtcatgaactgacaattttgggaatccacaggctgctctgtgcttcagggacagtgttttggggtttggtagtttgggtcttggagtgtctggccacaaatacttcttcagagttgatgttctagggtgtcattctccagggttagattagcagatagtgacgaattggaagtccaagttgaggtcttgacagctgctgcccagggccaagaactctgctgatttccaagaggccaggagtgtcctttctttgcaggccaccctgtgaatgccatctcattgtcccacatcataattgtatcattacacgtcataacaatgggactgcaacagttattactgcacattctaattatgtgattactcagtctttcaccaattatataattagatttaattataccaattgcacaaacaaactatagtcaactacacattacttaaaataaaatccagaactgcgtgtatggcagcagttgccctgcaaacaagaatagaaagcaagagaagaaaggtttttttttttttttttaaaccaatttttaagtggaaggaattatatgatctggtagatctttaaggataatggcaggaaattaacttatcatgaagtattttaaaaaaacacaatttctttcaagaaaatatggaggatgccaaccaaatgaaggatttattccactacccaaatagcttactgagaatggtgagaagaaaagagcaggaatgaggagagagaggcagagaagttcctatgtgggaggtggagggggatggggcatgggggatagggactgaacaagtttgacatttagtgatttaaaaaaatcatactgtgtaatttgaggcagagcacattatgatgccaatgcagctcagattgatagattgagccttagccctccttacctaactatttctggtatttctgacttcctttcaccctcagttcattcccccctggataggaagtccaggtatagctacttagaatcactacctagcactccaaatcaatacaagcagggcaggaaggtttgccctttgcaggttaagacttcagggtcagcaccctctggggttgtctttgagtatcatttgtgagacaaaatttgaataggcaggtccaataatccatgtcatactcatgattgcttgccctttgtataatctttggctttgaagaattcgaacttggtgccataacatataggtgacctctgttttccctactgtgtggaaacaggcatcctagaaacacggtattttctggagaataggtttttcttttttttttttccattttttattaggtatttagcccatttacatttccaatgctataccaaaagtcccccatatccacccacccccactcccctgcccacccactccccctttttggccctggtgttcccctgtactggggcatataaagtttgcaagtccaatgggcctctctttccagtgatggccgactaggccatcttttgatatatatgcagctagagtcaagagctccggggtactggttagttcataatgttgttccacctatagggttgcagatccctttagctcctcggctactttctctagctcctccattgggagccctatgatccatccattagctgactgtgagcatccacttctgtgtttgctaggccccggcatagtctcacaagagacagctatatctgggtcctttcgataaaatcttgctagtgtatgcaatggtgtcagcgtttggatgctgattatggggtggatccctggatatggcaggtttttctttgattaattctaggaacctatataagccatggcactgtctaggctggggatgtagcttagttgatgagtgcttgcctcgtgtgcaagagggcctgagtccaatctcaagcactataataaaaaataaggtgacacctatacaaaataaattttgatttggcctgcaaaagaatgaaaatatggtcatttggagcaacatggtacatactgtgttaagtgaaataagccatggaagaagagctcagtattggctgtttgtgctcatatgtggaagctaaaaagttgatttcaatgcctaataatgatttctaggctgggaggtgtgagggaaataaaaggaggttagatatcagaacagacagataggaggaacaactgtggtgatgtccagtagtgaagttcaaaggctcccaacacaaagaaatgactaagaagagggaatgctaattacactgatttgacctgtgcacacccgacactgtacactacaaatatgcacttaatacatgttaatgagaatgaaagcaaatagagaagactgactggtgccccatggcctctacctggtacagagcccttgctgttggctgcttctgcaccctaatggagaagaaagagtcttcgttgttaggtggctggtaagagcacatctggaatagtgggcataccacaattatacctcactaaagacatgtaattggtggatgctgcttaaggacatacttcagggaaattctctgttgagcttggctgagtacgagagtggctcagcttctgccttgggatccttacaaaggttgacaggatatggattgctgcaaatgtacatataatatctgcggtgtgtgcttaacactgctatagaaataagtcttggtgctacgctgggtcacaatgggggtgcagcatacttagtttcatacatgaatgaaaaatttaccagctgtggaactgccaacacacatgtgaggggggaaatgtgcttttaagtctcagatagaggtgtgcgtgtctactttcttctcctgcagagttgttcatggaagttaagtgaattttcccctggatatttccatctgctcttcagtttctgcagtgctctgggatgttgttacttggctttgcagtcccataaaggcttccacttttgcacatagatttatttgtccagtgggaggttaatgcacagctctggaaggtgttgcccagcacaagaaagtacagcgatcatggaaattccagcaagcaaaccctggaaaactggaacttagagagggaattggactggcatggcacagctcacatttccttcctcatcttcaaaaactcagcaccagagccaatcaggagaaactgattcttatcagcgggattgcaacttgctggtgtttctcagtccactttgctaggaactgggaatgtacagagcagaagatggtgtaaagcaaccccagccatgttctaaaagccagcaaaactacaccaactgtttttaattctcagttcagagctggccatctctggttagcttttctcaacagaactgtcaatggaaagattagaatctatgtgtctgtcttggacctctcccatttcagcatttatggtatgcctgcaagctcaggttccataggatcaacgcaagagtgtacaaaatgccctctgtaggaaatgtagtcgatcctgaataagcatcagtggagagggagaaagcaactaccacaaggcaaacactaactaggtagtcagtggtcactgtggccattcatatagcagatgtgtatcagataattgctagtcaggaaacagacctagctgacagctgctggacattctggtcacagaagttgctctctgtaattctacaagctgtatcactagctattgggaacttactctatgtaaattgccaatctgtccttactaccccattcagtagcaccactgtgatttccttcatttgatgaagaaaaagaacctaagttgttgagatcatgttgtagctctcttttgctgctttgtaggttctttttttcttccacccctttcccacccttttaacccctaacactagataaagagaaaaaaggatagaaaggaaaggaagcaaagctatcattatactacttcctgctgtttggggtatcgagttccttggggcatttgatctttgccattaggatatctaatttcttctttcttctttgtacatgactacttaacaaaccacaaccaacagcaaccagtcaacaaccaacatgtttccccactgcaacaacccataccacctctggggttctagcatttatatgccctctgaaaagtccccagaattctgaacatcataccatgtgggtagtcactgggactagagattgagcccctgatctggatgaggagttcctaatcctgggacgacacatttcgctagagtctaggatctgtgttgtcatcatgagcacacactgtaagtgtgggcaaacactgaactgaagagactcctcaattaattgtacatcatatggagatcttgggactaacatttgccagactgttaatgtgttctttgcctaaccagataagcaattgacaaggagataattttgttctactttgaaatgagattgggagtagtggttaagatataactcaaaattggatgtcagatgcctttcaaagtatgtaatagagatgattaaattatcaaatgacttgtattggtacaagagaaatgaaattcctttcatgtgggtacaaaagtcatatatagctaggaattgggattagaggtgcttcatgctggtactgaaaccagacagtgaaagtacttgtaaactaatactgccttagcttagtaaaatcagacaagggctttaacattcaatcttttccagcattccttctgctctgccctctgtctattcatttgttcatctataggacatgcatattgattagcagcgacatctaagctttactgaaagattcctgtctcgtggagcttgcttttcagtaaagaaggtcaaaagtaggggtttggagagaatgtcagggggttactgtgtttgtagctttgtggggaagggggagattgggtgtgggaaagtaggctgagcccaggtttgcacagtctgcctagacctccctcagggcaggcagaagcgttatgttcagcaattatgacaggaaattgacaagtgctttctaggtgtcctgtctcagaatttaccgtagtctaaataatttcagagaacttctcctcagggaattttaaattatctttaccaagttgaaagaattttatgtcatgttgataatttagagaactcttttcattgagttttaggacacaatgagaggaaaatttttgttttcagcttcgcacagcaatgaagtgatcctaatttgtcttagtgctaacagatcacactttaagctgaggaaaagcatcttattgaataagatcattcttaagacttaactaaaactgtgtggtttctctccttatggtgaaactttattcttttataacatctctgggcagggctgccttgaatttataccatgatgtcatgtttcatttgagcaaaagtggtgcatgaatttgtaccattgtattgctgctcatgagaagcaaatgtaattaagaacttcctgactaggatttcatttactcaacagttaagggcaacattgttagttctctactcaaagcaattacaagtagttctattgacagcacactattgcaggagctagggacaacttcaaaactttgggcattattttacaaaatgatcctgatttgcacacatggtgtttagaaaaggtgaaggcctggggaatttgaaaagttttgccacataaacaagaggatttgggttcaaatgctaaggagactaaaacaatggatatatagcatgcgcacttggattcccaaagttcttactgagagatggaaggaagggagaggaaaatcttagccagctagcttgttataagcagggaacaaaacactggaagacccggtctcaagcaaggtaggagtattgacacctgaggttgtcctctgacctagaacatgggctatagcttgtacgagtcatattcatacacatatatgcacatgaacaggcacactcaccaaagaagaaaaagtagtaaccaaaagaaactgaccatcaaaatcaatcctgacctctaaagacaaataaaatcaaaaagtcagtacttagaaacccctttcatgccaggtgttttcttcacttatgtaagattacccagagtatatcatattcaaccttatttagagtatattagagaatatttagagcatgctagtttatatccactagcttagtgtcttaccaaggagaccctgcagatccaaactcttatgtgaaatactttgtcacgcttggtttttaatgtgcgttcccattattgcttggatccttggctctttgtgttagatgtctgaaggagtggaccagtaacattgacccagattgacttcctaacttctgatgtacacatatctctagatttctaagttataattttaggatgtttagtgtcaagttttggtccagatttctgaactaaagtacaaataaacaaaaagtaattctagtctaaataaaagggagatccatttttttcatatgatttttttaataaagaggaagtggttatctttttatttaagagaaaataatttagcattgtgatggctaatgacacagactccaaacaattcaggacagaattcttctaatataagattcaaattctgccgcggcatctcagggctttggcctttcttggctgttcagaacagatggacttattggggggtgaatgaggctatcggcaaggtcatgctcccctcttgtcctcaagtgtgttctgtgttaggtaaaataacccatatttttccaggggacaaagaaggactccataaggcagtctcttggggtcatgacagcacctgggggtagcattaatatggttgatgcaaatatcacatagcttaggttttgatctctatacatgattctggggctacttggaaatcactttgcaagatgagatttcttgacactagcaactcacagattacggtctgctttctaaagtctgcttattttcttcctccatcccttaatttctcttctcttctttaaacccttatttagggtctattgtatagcccccattagagagctcaggtgcagcaggtaagggggagacagaaacaaatttcctttaagtcagtgaaggtgctaggaaagacgtgctggtgaagagaggaaagccccaggaaaggcctcagtgattctaggtgagaggaggatgcaggaagacttccaagaggtggtgaccactgagctgaccattcacagtcacaaggtttgcctttgaaatgtgccagcataggagtcaagtgggtgaggcagcaaccagtcctttgcttgtgtgtatccttgtagcttgctagatccctgggatccttctcttgttcactgcttaagacatttctttagaaagtaattgtaagttggaaaggcccctttcttcacagcagacgtttcctcgctcttttggggaaggctttgtataactaaccagcttgttcccaggtcaagctgttctggttgcttaccatttaagcagaaaaggtggaaacaccaggctttttaaaatccccagccacctgcaggtgaaattccaggtgggcagcagcagtagcacaggttctatttcaggaaggagggctggatctgctctttctggttgctcatctgttaggtgttcagttccaggagcttttaggcttcacacatttccgtgtttttttctttcatttctcacagaaagatgaaactcatggccatgttctttgcagtttttgttggtctaaggattcatcttcgtagcttcattttgtgcattggctttacttccaatagtattggccaaagcaagggcagacaaagagggtaccacccatggcaatggcagagggtgttgcaaaatgcctaaactctaaacattgccttgtctctctttctgccttgctgcttatctgcgattccatgattagctttcatagttggagcaggttttaatgcttactcctcatgggagtagaccttcatgtctccttgattcttaagtagacatcagtttttcacttcttcatggggttagcattgaatttttggcaaggaaagagataaactggaataggaaatctagggtagccttctgggggactgacagtagtggcatcgttcagcctggtactgttcagtatctgcttatctgagcagattgccatgatttcttcatcccaggagttaccttatcacatgtgttaataacttcatttattaccagttgatttttctcttgaagaaagtctcagagacttggagactctgagaatccatgtggtaagtaaatgatgcttttgtttaaattaatgtcctcttttgggacaattgatgctgtcatgcttctcagtagcttcctactcctgttttgtgtatatttctacatgctactatacatgcaacaggtgcctaacacaggctttctaaagaaacccacttgcagatttctaatagactctgctcaaatagagattgtattggctcctcaatacattacagatttttaatgtgctttttatctatatgtatgcatatgcactctgcctgtgcaatgattatggaggccagaaagagtgtgtcagattctctagaaatggttatagatgtaagttggtgggaactgaacctgtatattctgcaagagcaaacttgtagaatgataattttacatcacaatagcttaatacctacaagagggtcacaaaagctactgtacagcatttctgggtgaaccatctcacctccaataattctgttatatagccacagttcactgtcacaacttctgacacatgctgttaacttgagaggaatttgccagctgtctacgtttttgttttgcgtgtttgccataaagattgataatgatttatcccttgctgatttgtgttaccaacttcccagtcagcaaacaaaattctccttgcaggaccacataattcccttatgagaaactgaatttgaaaaagagaaacaactttgaaaggacacactaaagtttatattaaatcacattcgcagattttgacatggtacaaattcccaaatcttgtttaaaattcaacaataagaaaataattgttatcaacacaaccacttttagacccaggattatagatatctgaaattaaaaaacatctatttttactttgtttaccaagccatgcacatcaaaatgtccatgaacccttgctttttcagttaatccaataagaagctgttgtcaactgagtagtgattcctctttgatatgtgctcatctggaactcctaacaaatgtgggtgtgtggagggccttactttcacaatgagacagctggggaaggcatagcctgagctttctctgttgatggtgttgctcaggcattttagtagtctttgctggttgccatttctaccccagacataccattgtcacttggggaaggtgacagtgctctgaggttactttgcattgttctgtttggtgactgtgcatgggtttgtctgttgttggagccagcagggaggaggacacagactctgttgggtttgtctagttttattcactccagagagaaaggagatggtagcccagaaaaatcccactcttctcgaacctggagagacttcctgcatcttataggggtggcaggtgcaaagatcagatattttgaacttaagatctgtgacagcagtggttctcaaccttcctaatgctggaactctttaatacagttcctcatacgctgatgactctcaaccacaaaagcacttcattgctactttataactgtaatgttgttactattatgagttgttatgaattttctgacagtcttaggcaacccctgtgaaagtgtcatttgacctctaaaggcgtcacaactcacaggttgagaaccactgtgttacagtattctggatgatggaggtgagtggagacagaatatccaaacaaaagcatcctccagtaacattccttcccattgagtgatccctggctgagtggacacgaggcaccacagtggctgcgactatggggagtctcagtctgtttccatggtgggttcagggcatcattgtctcctctcagaagccacaggcagaggtaaatccatacagtcagcatgactgcatggtctctgcaacagggagacgacactctcctctttctgctccatgagccatgggggcagagctcccatcacagttacactttaaagttgtgctaaatggacataaacacacttggttacattttaaagagaaagcactctctgaaaaaaaaaaaaatcaccttccctcttaactcttctgaccaaagggaagtctctaagaatgaggatttcaggtgtccttctgggagctggaacatccaagcccccaaaggaccagggttgcaattgtcagttggtctctgtcctttaagtactattgtcagtgatgattctgaggacatacgtaagtcatagctcctccatatgcctaagtttgaccacatgcatcatacctaccactgtaggcatgtgtctgtctgtatagatatccctgttcaaagtatagaggcaggcctctctcgaatgcttttctactgtcatttaaacactgcttttgtagtagcctcttggtaaggtaacttctttcagaagacaaaaagccatgtgctttcctttctttgtgacagttaagaccacagaaatagacctggatggccattgtggctcagagaactactttgttggtattatgagcctgtctctaaaaaactttgacagtgcaaggctctgaagaaagccattcctcaaggtggccttagctgtcctgaagcagagaatttcaccttaggacttgcataggttagcgttaaagagatggatcagaggtcgatagtactggatgctcttgtagaggacctgggttttggttcctagaatctacatggctcacaactctctgtaactccagttctgggatctgatgccttcttctcatcttcttaggtatctggcttgtgcctggtatatgtgcatccatccatccatgcatccatccatccatgcatgcatacatacatacatacatacatacatacaaacatacatacttgcaggcaaacatttatacacataaaaaaatataaaaattacttctttcttctgggatttaatttgataaactagccattcccctacatttgagtttctgtcggcttcctgctatctctaggatgaagaccaggcacattaatgtgcacacaggtgcttcactatcttctgtctaccctcggttcttgccagttattcaagccagtaggctctgcaacagtgtgaggctctgtgccctattgtatacccaaatctctgcccacactcagttctccactcctgtgccccaacccaccttctctctcagatcagtgtctgttcattacttaaaatccatctcaactcactcagagatggtcctttcatcccaaaaacctctgcttattacttaggttggagtcttagagatcacagtaggtattgcggacatagcatcaccaaagctggccatgatcacagcatttaacatttactattttatctctctcaacatctcaaatgagttgtatttacatgtaagtgaggattttaaagtgcagagagattcatagcttgtctatagccagaaaaatgtatttagtgcaacttcgaaacaagtcactcttgaatggtgtattgttctggagtagcaactgtgtgtcattgaatgtcgtgtccttccaacaagtggagtgcccgccactaaagaatgctggagatatctgttgaatgagtaggctgctttgtccagtctggctatatttatctttatgttctggggtggaactcaggtctcagagggtgttctgctctcagtgagactgacaggtggatactacgtcctgtttgttcacagtgtgtccaagtctttatcacggctgtcatcacgatctgcgcaagctatgagcaccaggagagcatattaaaaggagtcatttaccaacactatattcctcactctccttccagctggagagagctatgggaaaggattgcattgccaggattacagtacatacctctatgagcagtattcagtatctttgagatcatggaaggcaggcaggaaaaaaaaaaagaagaagaagaagaaagaaagaaagaaagaaagaaagaaaggaaggaaggaaggaaggaaggaaggaaggaaggaaggaaggaaggaaagaaggaaagaaggaaggaaggaagggagagagagagagagagagagagagaaagaaagaaagaaagaaagaaagaaagaaagaaagaaagaaagaaagaaagaaagacagtactctttagtagctgctatgtcattgacactggagtggagcttaatcccttcctcaatcagtgctgtcttcctccttcaaaacaaacaaacaaacaaacaaacaaaacaaacaaacacaaaatcttttaaaagcttgccttgaaaatgatctccataaacccacatttaaaaaaaaggagctggtattgtgtgtttataatcccagtatgggggtggggggcaggcagagcccggtgctcactggcctccacagcaaagaatgcacaggtgtgtacaaacagagacagagagagacagagacagagagacaggaagaagaaactgaacgtttcaagtgtttactcatttgctgcttcgtcacatttaattaaagaatatatcaaggcatgtcacctttatggaaggttccttcactgagtatggtataagaaaaagaatagctttattgtgagtggattaaagttacagggcataggtggcttttaggggtgattttgcctttcaaaagctttggattctcaacacattctgcctggagattcccagtgaattcggaaacgttggcacttaactgtctcttatgtatcagccctgcttttgaaataaaccatcccaacaggaaatcatggtgtgtatctttatgtcaccaacaccttgctcctcccaaacattcaaaacttctaagcaattatggcagaagatgtcatgaggttatttgtgaaatcacatcaaaagtccctgagtaaaaatacacgcatatgaagggctggccaaggagaccatctcaccagactaagagtcagcctgtgctcccctccctgtcttctctcccctcctgggctcgaaagctgcctcttcttgtgtgaaatgccagtgctctgtatggtgttctgtttatagtggtttgaacctttttctgcccatatctgtcattgctgaagtaactcacctctctcatatcgactcttacccaggagccgcacagcagactctttgatgtaggtcttttctgcatggcagccaagaccaagtgtggttttcattgcatgctgcaacctcaccctttgggttgttgcctccaggttaactagatcctctccctgcactgcccatgcatgcgacatgcttttcctggtagcttttttgaatgtagtaagcactggacgcatgcatggaattaaagcagcgagcattcctatacactgaagaattgggatatgtaattcctctaggatattcttgtgggcctgcaaattgttgatattccccaaagccactccatggcttgagagctcaagactagagcattgggaaagagataactaagtctcatgttagcctggagctcactatcaggctcgtggccagggatttagaatctaaggtccattgctaagtagcagcttacctgatggtcggttctgtgccttcccaacttggcatgaatgtgctcagattgcccagggatcccaccacttctcgtggcttcctgaacaatgtttcctactttggtttgcttagatctgataaatatatcaacttaataaaaaccactagtaagataaatttctcccaagaaatacaactattttccttgcacatagcttattgtatctagcaataacactaattcaactttaaaatacataaaaggatagtactatagaggttattcatatttactgaaacctgttggcactacattcagcattattgattaataactgtgatcctttcttccccattgcaacacgcgttttactatagggctggtgatgactttctttaaatgcacttttcattcttttttattgttgttatgaaatgtctactttgtcattctgtcttgtattctctggatgagcttttgtaaaatctaattgctaggatcttgctggatctgtggatggtgttatttcacacgagaaggcattttaagctgcagacatactgggctgtgaactcaggaagacagaaagtagagtgtcatcaggctaagataataccacagtgggaggggaaagccccatagtagtagcttgccagtatagttaacactaaatctatgaatttttggcagttagaatgaaacaaagctgaagacctcttgcctctctggccctccctccttgaaggtcagttttcttatatctgggggcttggaagagttaaaccccttctaccctccattctattagacacatcctgttcacaccactgaagcagggactttacttagaatttcaaacgtgatctttgggtaaccactaaagaggtcctttgagtctgttttcctttctgaaaggagcagagatggaattaggggacggccctgctcagtcaggtgatgctgacccaggagtcaaagcactcatctttaggaggagagcttctatctaggcctcctggaaaggaacccgctgggtctccttgagaggctcttcagcaaagaaatagttccctttgttcctagaaacacacagcggttcctgctatagtgacagaaagcctgcagagagacagagagtgggggtgagaggacccaatcacagggcaaaggcaccagtcctgagaaatcagacctggggcatcctcagagcaggaccatgctgctgtggttttatagggatgcagaaaacaacatggggaagaatggcagagccagcaacagcactgcaaggaggagcagcaggaagaagcttgctgcttttagctcacaatacccctctccaaatttagattcaaaagcccagtgcacaccatccatctagattgtggtaagagttatctctatggcctgaagagataaaatgaattttgataaataaaggacttacagtgtgaaccagcagcaaaagggaaagaaaaagaaatatgaaggaaaagaattcttcccagagcaaaggcactgattccatgaagtagataaaagaacatatacttggaaatatgcttatatgagtatagggtttagtaagaaattctcttagattaagaggacctttggttctgaaggtaatttgtcccactgactgtccttttgttggtctctactgcccaggttgccttctgacattctgaagaaattactcccctttccttgcagtcagcagattcatgaccgctaatcagcaacatctcagactgtcctttttggctgtgatgctgtaggctctgtgcaaaattcctaaataggaatacctaacaaaacatccacgcctctgctgtcagccaaagacagagctaacacacagcttttttatttccttgtgcaataaaggtataattgttttctatgctagatgtcaataagactggtgccaggtctctcccaatgtcctaaggggggaaaaaatctccagtaacaaagaaccataggataccacaaacaaagctatcaccagccattagtgtcaaacaaaattcatcccaggctgggtgtatgtgttgctggttattgctttttagtcttcaaggaaaagcaacagataaaagaaaatgctgttacctgttcctgatgctaggactcctcagcactaaaaggttttgttgatgtcaaccatgagtgaactgctctaggtagtcatggttgagaggcatcagaattggaactatgctgtcagtcagtcagtcagtcagtcagtcagtcagtcagtcagtcagtcagtcagctagtcagcctgtcagcctgtcagcctgtcagccagccagtctgtcagccagccagccagccagccagccagtcagtcagtcagtcagtcagtcagtcagtcagtcagtgcatcagttcattagatgagcttttaacgctaagtccttgaaggtaagattagagtgaggtgacagtgccaaatgcatggtatcaaggacaaagaagaggacgtatgtagcaaacctgtgaatgacctccacatgtcaaagtctaacatgtggagaaggctcactaagaattgttttgatctctgcctataataacagctggaagtcatagttatttgaaaacttattatgtgacaaaatgccagcacacctggtcagactcaccctcccaggctgcttttggtgtgtagggggctcatgctttctccttccagggcactctccattttctatacaagtatgatgcccagctattttgaaactcttttctatttcagactgttttttttttttttttaatgaatggtgatcctggatcattacttaccagtgtgtagatgtagctgcctattggttatcactgtttagatatgactgcctatgaacctcttaggacatgtgtgagatttagtgtcctgagagaagccatgagaagagaaagcacagcgaattgatgaatcctcttactccaatcaaggacctcctgtccaaggagaatgttctcaggtgctagcagcctcctctaacccacccaccatatgccaggctctgtgtctgagtccccagctctttgtcttgatctgggatttttttttcttctgccttttgtttctactagttgccttacctaagatattccatttgacagatagaccaaaggtggggttggggttggagcagaatatatgtctgtgctgaagggttctggaaatgtgtgtgcacatgtcttttttgtgcctcctactcatacccatgtggctcttgaaccatgcccttgaggaggctccccacttgtatctggaacacacatctgcataaagatgtctttagtcctaattagacaatctctttatatctcccctcttctagacagatgagactgctgaaggggagatggctagggcccatggagttagagaagtggatgtctcgaatgcatccattgtcacttcacagataatttagtaaaaactgcagcaggcagctcttgtttggcaaaactctgtttttttatgtaatggcttaactctgatttattacataaaagttgctggcaaatatggacactaattccactctggtaacaactgtgattgaaataattgtagtctgtagtcaagctagagaaaatacgcattagtgggtaggttgtcttggacatcattccaggattccaacagtgagaaaatacatttatgggagcccagatagaaaagagtacttaggaagggtttggctggctcatttctctgcccctcttccgcatgcacgttacgccaacaggacaaacagagccaaagacctgggaggaagagcatccagcctcccgtgagccattcattaaagcgactcatggcttttgctgtcaagaaatcttgattaattatttagtatttatgacacagtatggctgcatgactctcatttccctatgttcttctttaatttttattccaaattaatatcctgacatatagaatctcaccatgtggtagtgagctctccaatcaagagcttactgcatgtcctgttgagtatttgaatcacattggtgtattttacaacgacacagtaatgtagacatatgcagagaaatggagcatgaacatcactaatgctttcaattttgttcttttgcatcattgcttctgggggcatgtcccattggcagttgccactgtcatccccactgtgacttacaagtattgttgattgaatagatagtccgccaactttctccttacaaaagcctttaaattttatgtctttatccccagtttacagacaagaaggtcaaggcttggagaggtcatgctaattctataacataatacaggtcataggtgatagagctaggatttcaggattgtgagtcatctttccaacttcacaccaattgtctattgctggtgaggctgacttataattccagtgttttgcttttaaatgattcgggtacatttatgcataaatgaaggtaaatataagcatagataagatgctcttatagtttgcttttatgttaccacccccccccaaaataaaaaactttgggaggaaagggcttgtttcaccttatagattatagttcatcatgaagggaatccaggacaggggctcaaacaggaacctggaggcaagaaccgaagtagaggccatgggggaatgcagcttcctggcttgctccccttggcttgcttatcaacctttcttatacagttcaggtccacctgcccagggttgacactgcctgtaatgggctggactctcctacataaattaataatttagaaaatgcctccatgacataccctttggacagtctgatggaggcagttcctcgattaagattctcctcccagatacatctatgtttgtattaagttgacagaaactacccagcatagatactgaattctttttttagagtgaatttaaaaggttctataagagagtagcaaggcttttaaccacctgagttttgtgatagcaagctatctgtgtgtttcattgagaaattcaatgtgtaaggaactgacatgttttgtctctttatcagcagtctgtgtcattttctttgtctcctagaagaatgctttattcttaggactaattactaaggtagacaccctgtgccatacaaatgctctgagatccactgcagtcattgttgttcaaagctcaagattacagagcacacaaggacccaacagagcagcgagggttcacatatctcccctctatccatccctgttcatctcagcacagtcccgatgatctatgtgtttattgctattgaatcccattttataattgagcacaggcacaattaaaagctgttgtcaggaagatgaataaattatcgacacaaaccatagcgaaggacttcccgacaaagccatttaacaaagtgagcttagatccatactgtagagtgacaatgagtgttttctatttacattaaaacaagtgcattgtcctttaagaaaaatgcaaagcaagtgcaatgcctaagaaaatgcttcaagtttaaacgaagagtttatttgatataattatcattggatttcatcaagtattgattacagcccatctgtcaaagagaatggtgtagaagacaccttccttaaagatgttcgtggatgaagtcctaatatcagtagacagaagagacttgattctgtgtgctaagaaagaaatataaactatactacttaccaaatgtatgtcccaccctgatattagaaaggtaaacatttttaatttagatataatacttttactttatgtgtctgggtatgttgcctgagtgtatgtctgtgccccacatgtgtgcatgtggtgttgtcaaagcccagagaaaggcttgatcctctgtgactggagttacaggcagttgttagctgccatgtgggttctgagaaccgaacccctgtcgcctgagacagcaacaagtgctgttaactgctaagtcacctctctagcactgaaagataaactcttaagtgtatagctctgagcaggtgcttaaaggggggtactaagaaaagtaaaatgatacaaagacagatagactgtgggttgttccaggacctgggatgctgtccagtttagaaggtaatggtccgcttagagatgtatgctgtctcaatgattaattagcatccagtcactcaaactagttccattattcttacaagttcacaagatatttttttaatatctgaagttatgtgaataataccactgattataggttgggatgcattgcaaagacttctttctcttttaaaattaatatagactggatagtcaggtacattttatcctcattagtaaacaggtagagtgaagcactcatcttgaccgaaatatccagacaccgccaagataaaacttcacattagtgagatttataccctccagtggctgtagatgagttctataatctgtgtctaaatgttttcatcttttttttttactttgattagcaaaaatggcatacaaagtttattaaccctccagtccatagttaggaaggagtattgaagaattcaaatactgtcaagttttatgatatgttggacatagtttagacaggccagtttcctgtagattctctcaaacaacccctcaaacacatgacttcttacactatggcagtctgacctcagcagtccatcagaacacccaccccttgttttcacatgagtctcttgaaatgctctgctgatactggatactgtgtcttacacacctccccttctaaggacatgacagccgttctggaaaggtagcgtgattttacaataaagttgcttgatcctcatcccaacttaaccccttagttatgtgaacttgggtagatattagactctctgattttctgctttcaaatcaaagaattttagcaaaatacacattttatctaatccttttataaggatcaaattcatgaatattacgtaaatgctatacagttgaagaagaattgagtgtggactgaatgaggcactttctgatctagagctgtataaagtcacctgtgaaagcctggagagataacaccgtggtttagagcactggttggtttcccagaggatctgggctcaatttctagcacccacaaaggcagttaataactatctgtgattctagtttcaggagagctgagcccatcttcaggcctttacaggcaaagggtgcacatggtacacagatatgcatgtaggcaaaacaccagtatgcaaaatatatatgaataaaaaaatttaaagcatatgtatgttccaacatccatttaaaaaaaaaaaagaaagaaactcagagatgaaagaagatctgtaaagatgatgagtcaagcttttaggacttcagaaagctgtctgaagtctgaacacagagacaagagcatttgaagaggtcacagcactagcgaagatttagagttagcaatattcaggtctcattcctgaaggaacaaaggcaccagcctaaagcaacaaagactttcacttatagcaagtagcaaaaaataattacattgaaaactcttgaatgaggcagattttggagtttcttcttagctgggcacggagttgatacttgaaacagaagggtcccttaatgctccatgaatgacatcttttaattagattaaaatagcaacattacagaggtaagctggaggagtagagtctgccatcattaaattttttgaatggactcatatccgcagtgctttgaatcggacctctataatcctggtggggattgagaaggccccattcaattttcaaaaggactagccttcaagaatggggagaatttgaatgatagaaattattgtacaaagggaaactttgtttcttgaccagtcccttccctattattatctggaatgcttgttgttgtgttccaaagctgcttagcatttccttattgcctgtaaactactgtcccctgcacccccctcccccatccagttccatcatttcccatgtaatctagaactgagaatgtactcagcgggtactctctgattgttaattgaatgcctactgccaaagcctgtaaggtggtgttgtaattatgtccctgtatgtttttaattctttccctcttgtccatatctgaaactgaaaatatctgttcaaagccttgatcttagcagttagttaagtggtatgcagctggttatctgagggtagggctcaaacacttaatcatctctgttcaggtttgaatgggaatcttcttgagcaatggcacccatagctagagcatagttgctagaaaactcctcagaagtagtagttctcgtagtggggtctctggacaagaacatcagtggaatttggaagattgggagaaaagcaaaaccctatatccctaatccagactagtaaatcagaaactccggagctgaggcctagcaatttttggcaaagttctccagatataagccaaagtttgagaaccgcagtctgagagaaatatcttcatggagttggacagtcaacagcaggaggtagaaaaacaagagttcatggatgtgagggtaagtatggatgcttaggaaaagagtccgtatgtctctctgggagatgatacaggattagaaaagatgggcgttgtggggagggcaggaaagccttgctttgagttttgaaaagttccaaagccaagtccagaaagttctatctatcaaatcctcatgctcaagggcagttacaggaaatatcattgtttagtagatggaagtgtctcctccagagacaactctatgttaaacatgtcctttcaagaagttcatatcccagccaatgtcctatattgcacatgtcctgtcagaaggaacagatcgtggggaatccttggaaaatcctcaagcttagattattgttcaacatactaaatgttcccaaggcttcaatatcatagacaatctgtatagacattagaaacttaggaatgaaaagtctatcagctaccaagtcttacatcctcaacttacccagtcactggtcaggcagaaatgagttaggtttggcctgattgctcctatgagagttataactggtgtctttcggtccttaaccctcttccctacccccagtttgcattgtatgttcacctaaaaccttcgctgatgtgggcctgcctcatcagaatggcaacctaaatttaagaatgtgactcagagtcattttcttttgtagttttaaatagaagttccatttccccactgccatctgcggatgtagacaaggaaactctgatgcttcacacaagtcaaaagaggcgcttccatttcagtttgctcctgcaatgagtattaatcacgaagagaaagtctcatggggagaaaaataaatcctgataagccaaccttttggttggtgagttatggattctctttttttaaaagatcaatgaatgccatggtttgtttccatttggggaatgaaataatggggctttggcactccaccctgtggtctctgattgtgtgagagcatgaactataagcactcagaggatttatctcagaagggatcctgataaatagttctgtcggcagttgagaaaccatgcagggtgttgttcctggcactcccaaggcagggagacgttgatgaaatggatgtaaaatatattctcagagtgctctggtcccacctggtgctgaggctcagttcagcttttgtctaagaattttcctcttcttgcctctcatcccaagcatatccatagctcagggtgtgttccggttactttgtgccttagccagaggagcagccattcaaaactgccacatgacttctattttactgtttgagttcaaagtgtagagctcagtgaatggttaagggggtgataattacatcagttctaagattgtaaatgaccaatggcaaggtctattatattttctctgttattttctgtgaagggagatggggagtgttcaggtatgggtttcaacatggcaccttttagattaaagccttttaattgttgcactttaaacactggacactatgagaaggaccagaacaaaagatgtgaccaggaaatcaaggattgatgaagaagagttgtttacacttttttgaatatcttatcccacttaagttgaacaaaaacaacacagtgacactaagctatcatctctctaccataatccagaaaaaaaaatcttccaaggaaatctccaaacaaaccacaaacccatggaattaatagggcctggagcagtcatgagagccctccgatgtcaccaatgtctctatcagtgactattgcgaaggcaatattgagcctattgcttggccttagacaagcaatcactgattttccttgatgaatttggacccaaggctttcctttgttccctatgtagaacgaaatagtgaatatatacttttagtgcagatgccaacttcctgctagcacaatccagcacatgagtgcaatgcttacctgcaaatctctcacatactcactcacttattcccttacacatacacacacacacacacttaattttcagcatactgcccactcaaggtctttgagatctgtaatagttcttacctgtcaactttcatgcatatctgtactcttgttatttataagccccactagagcttaagaattttacacctgtcccttgttggctacaggcccttgtttccacttaaatgcatgcttgtggtggtgatggtgtgtgtatgtgtgtgtgtgtggggggggggtgcaagctaagtacaagggtaggctgctttgtgtaagcttttgttcctgcctcttttcagcactagactaaccagattccattctgtctctcccttcactttcctgccttagtgagaactcggcagttgtcatttcctttgtaaaaagaaccgtgttctgttgcttttgttcagtgtgcttactttgtaaatgcaagaataggttattcttcctttgtgtgtggagggttaacacatatcgggggtttgggacacgacaaagggcatgtttgatttgtaatccccgtgaagaatggagaaagccagtgcatgtcacgtgactggaggttcctatagactgccctactgtgcctctgagtaggccctgcattcccaggctgcactgactcctgcctgttgaacagccaagcattatcctttgtaaggtacaactatactaactggtatccaaatgcagtgacttctaaagtggccttgctgctcagcaatctttcctgatgcacctctccagctcccactctcctagggggagaggtccacgttgcttcccatctgaacaaggatttggagatctctccatactccctccctttcgcttacctcgctgtcttctattcctgggctgggtgcttccatttgcttacagacagcagtatactggaatttcttttatagcttcgaggtgtctgtaaggctttgctgcttcccacctaatccaaactttgcgactcctcacatactgattctctgatcagtttgcagtgggaaatctcatggaagccacataccagtttgtatagtagtactctttggaactgcctactcttgaacaaagtagagtgctaggggtgtgcatttggctgcttggcacacacatgaagcccattaacctgcatgccaacaacaacaacaaataaaattaacccttagagtactgctttcatacattaatttgaggttttgaatcatattgttgaacattgcttttatccccagtgcagagtaccacacaggaagtccagtcttagttcagccaggacagtaaccaggatcctctcctacaaggctttcttgagctgttcctgggtcttttatgaatatactaacagcttttagaagatccagatgtgggtgctggaaaatgggctccacttctaatgggctggaggacatagggtttgttattttagccttgttatgagtcctttttaattgaagacatcagttctttaagggttaatatgaaatcaagacatttggtaatccttcctgcttgtccttcctccaaggtgtctgtctgcatgatcctctttagaatcttagatcaactcctgaatgatgatgaaaaacagtacataaaattatcaccaacccccaacgcaaagaaaagaacaaaacactgaatggttgaatggagagccctttggcaatgcttgcttgatggtcatggtcacaaggggtagaaagaccaaatgttgtattcagcgaacattcattttgtcctctaccccacacaccgtttcctggcattgtggaagctgtggcgatattttcttggccttttatttacctcttgctttttcttcttcctgtctaatagcccaatagaatcctgccagaatttctacaaagatttcacattacagatcgacatggctttcaacgtgttcttcctcctctactttggcttgcgggtaagtttggcagcatcttccagtagtaccacagtggggcatgagaatcctaaacgtatggataaccctccacccacgactgctttcctaggcaaggtgaagcctgaggtctctgtggtggacaagagacctgtgttctggtttagggtctgtggacaagatctacttagctgagagctttctgaaacatgggtttattttggttcaaggaagggtttgaagcaatggtacgctgactcattgctattcaaacatgactgtatttttttctattacaaagtacattgaaaaacacttaagctcacaaatgtatatttaggaatgtcgagactgcaattatcagggttaaccaggagtgaaggctggtgggacgtgggggtcaaggaggagtgaaggcttgtaggattagggagtttacactagattaggcttatggagattttttttgtgtgcaaaatttgaattgtgcacataaatgtgagtgcacatatatgtgctttattcatagttagatttgtatcagaaaggccaagaagctgagatgaattaaaccttctctaggcatctgttggaaaccacagaaaatcgcatcgcctgatcattccctaaggctaatgtggcatatagtcagtcacttcctacaaaaggctgtggattctccaaatcaagctagtgattaatgtacagaacagcatgagattaggtgaagagcagagtgtcgccccgcagaccccatagaaacccaacatttatcctttgacaaaaggacatatattaaatgctgacaccgtgcttctcattttgtttttctgtcttattttctctttccctccagtttattgcagccaacgataagctgtggttctggctggaagtgaattcagtagtagatttcttcacagtccctcctgtgtttgtgtctgtgtacttaaacagaagttggcttggtaagtcggtctcttttgccgtttcactggctcttcagcaggatagattaaagatatatagggtccaggaaggattcttttgctggtctgtggctatgcataggcagttttgcgtgtggccatggatgatgttcttggggtgtcagaactggatggcgacagcccaggagaatctgtggaggcagagctttagacggtatagtttcatcattgtttaagtcccgtggtcatcactgtcacagctgggacttctacagttcactcttatgtcacttgtcattcaggaattgagagtcaggactggttaaagaagcccatgggaatgagaccaaccgtcagagtggcaggatctcgtgccccagaagtcccacctgtcacacttgggctttatttatagttgcaatttctgggataagccgtacaagatgaaacatctcaagtggaatcacgggttactccactcccttgctgggagaatgttccttagtgcttggcttatcaggtcacttcctgaattaagaccagcacagtaaaacaattagtcatgaaaagcaaccagctctgagaaagattaaattgacagctcccagctcctccttgatgctgtgtctaagttataattaacatgaaaacagttttgcttccattagttaactgaggattggagtacttacccagaattccctgtctttacttgtaggtttgtttttttttattttggtttggtttggctttttaaaaaattaattaattaaattttcttttttttttttttttttttttttttttttttttttttttttttttggtgctcatacgggacaacttatatttttcaaaaaaaaaaaaaaaaaaaaagccctgggattcacacacacaaaaaaaatacatgttctaaccattaaaaactttcaactaccaaaaaagaaaacagcaccaggccatttctcctccttttgtcctccatgagtccccaacccccaccctaagatgccgactattaacacacctttctgcaaactcatctcatcccatgcataagtaaatggatgtgcacttatggccaaacattagaggggtactgatgttcctatgagaaattgtttcaaataaccatattccactgcaatttagctcttgtagtaacacgtggtggccatcccttcagcaccataataaggtaaattttatagccatttgggaaatttccgttatctgcttgttgtgtagtagacctagctctaggttctaatggatcgcctggatgttttgtttgctagcctgaacgatattttcataaacactatcatccatgtatttgtgaaattccattcctatagatatttccatattaccagaagaggcattgccaagtaaaagagcatgaataatttattttgtagacattgttagataatgttctaaaaatgttgtgggaagatgtacttgcatcctgcaaagccctgggtttgaaaacaactgtcacatatttagaacataagcatctctaatatataacatatagtgatcacctacacactcttggatgccttgtgtaattgtaccctcgtgtgtgcatatcctcagttagatgccacctagccccagatttctcattcaaaccatacttacttattgctgaggggaaagttttgcttcttggctctgagatgtgcttgctgagaatggtcagtatgtccagatcatgagagccacatgcaaatctccgtcctgagtaggtccatgggctggcgcatcccagccttctcagctgagctgacgattggctttgtgacctttgtgactgggtcttgttctccactcagtctgtgaaggacattgacagactgccgccttataattctgagaagggcaggaaccgagggactttagaaatcaataaatgatgcagcctcatgggaagcatcagtgttgaaactgaaaacagagcaatggcatgctggattataaaattaataacattaacaataacaacaataatagtaacaacaacaacccaaccaaaacaatcaaaagaacctgtccactcttgcaggagaaaacatttaatacgatgcttttgcttcttagtaactgcccttgggtggagtcccaaaccttcctgcctattacggaagagtcattttagtcaaaaactaggaggtccctctgtctgatttaatacataggttatcaccctgggaaacaagcattgtactcatgagccaccacagaaactaatgaacgttctcaggaaacagtcctacaaagatgaaaaggaccattaggtgtgaacagcctttcccttatcctggaaagtggaggtatactgccttcacactgactgggatttgggataagatagatacaagaaataagactactgaagtactgcacaaagttttgagggtgggggcatggtactgctggcatcatggtgattgaaaaccagagtggttaccaggggcctgatctgtatctcttacaatgcaccacccagaccatgttgccattcttattcttagcacaggattgcatattatataataaagcatatatatcacttatatatgtccgtttaagacactcagtaatacagccaacataacaatggtgagtattcaaatgctgcagcaatggtcctaccattcaatctgttacctaaatcctctcaatcttcagatcaaacctatgaggtaggaattgttaattacttcatgtttccagaccaggcacctgaagctcagagaggttgactctcttgtccaagttcacacagcctgtttggacaattttccccagtctgacatgatgtcactgcactcttttgctgaccttgagcttctgaccttaaccttgcaagattgggagctttgaggaccgatttgggaaaggcagcacccactctgctgcttgatgttggcattcctccatccccacttactcatcccacaacgctttgcctcgggccggaagggagggggagagctcttatttaagagcgcacactcctatatctcttctctcgcactcctcctttgccacctccagtttctagaaatgccacgaggaccagagaagcatacagaagtggcatggtgtctcccaagtttcggggcacttcgtcagcttgtagatcttgcagaggaccaagggcttccatgtgatcacactcagcagagagaagtagatcagaatccagctctctgttctgtcccagttcaattagctcttcctcagccactggcccacgggtctcttgatgcaagatcacacttacttgcctccagtcctgctttcttagtattatcccctgtaaaaggatggtagcaagggcggctccctcatagggttacaactgggctctagtgtggaagctacatactaagaacatagtgaaaactttgctagcagggcaatagctatcccagcctctttctctaacttttcctccatactttaaagtaccaaagaatcatatagagcaggatgggaccccacaaaaggcagcaggatgggacggcatctatgtctgcagacggcaaagctctgcttgttttaattcccattctcacacatgggctcatcccttcacaaaaatcctcaccccaaccactaaaataagtgcaccctgaaatgagaggaggattttattttgagctacgaacaacacgtttatctgtctgttcttttagaaactctacccccatgcgcggtcagccatgccacctttgtgcatgtagatgtttgtgtagaaagtcatctcctgtggttagaggaatggaataggagaagcttactcactgaccagttgcctgatgtgccttttattatcttagtgatagagttgaaaccctgggccttgtctatgctggacaagtgcttccctcccgagtcacagttacagccctgcctaaccaatttttattgagcaggtattatgtgcttagcactggcttgtgagtatcacagaaacagcctccctctttgttagctgtgccatgtttttaaacagattttacccatattctctctctgacagaatgaggagcgtgactggggcctccaatgaatggaacttatccattctaggtccaacagtagaccttaacaccttcaacaaatttcactagaaaacagaacactctagtatgaaatagaaaaatgagctagtggccagtcatagaggaaaacaacaacgaaattgaggctatctacttaaaaatatgactttgtatcctttgtgtgtgtgtgtgtgtgtgtgtgtgtgtgtgtgtgtgtgtgtgtgtgtacattctagaaaacaagaacaacaggttaaaataggacacaacatagttcctgtttgagactaaggttcaatcttattttggaaacaagataaacagacatgaaatggcagtaggtaacattgcctactatataattaagttcagaattgccaagcacagcagaaagcatgggggtgaggggtagtggtcagaggagtgagagtagcatatgcttgtgtgtgtatatgtatgtgtgtgtgtgtgtgtgtgtgtgtgtgtgtgtgtgtgtgtgtgtgtgttatgtatcagggatacagaaaattctgtggaacactgagccccagatgaggttggtagtggagggcagagcttgccatggaaaaggaagctcactccctgaggggagaggactgcacttcacagaatagtctgaaccaatggaagatagaaagtctttttcttaggctcatgtcagcctcaccaccataatagatgcttgtagttgttttctactgacatagaaacctatcaccacaatgttgtgcctcaacacagcctctgtgcctcatctcataattttttagcctggaagtccaacttgggtctggctagggtaaaataaaagtatcttcaagagctgggaagattgctcccttagtgaaaatgctttcctcataagcatggagacctgacttcagtccctatcacccacatataagtctgggtatggtagagtgtggttataattccagcaatggggaggcaaggtagatccctgggcctcagtgggcagccaggcttgccagtttggctggttttaagccaacgaaagactctatattaaaaaacatggcaatagcaactgcagaatgataccagaggttgttctctgccgtccacacatggttatacacaaatgcatacatactcacacatttacacacacacacacatacacacacacacacacacactggggtggagaaggaggaagagggaggaaaagagagcaagggagggagggagagaaggaaagaaagagggagagggagggagggagggaggatctggctcttttcctgaggctctgtaacactctaggcaaagagccatgccttgctgcttccatgtctataaccctcctagtccttgactcatagcttcttttcccaccagattcagcaaggttgagtccaggtaaaaactaaagcagaggccaagcgtggaggagtgctgcctgccagcgtattcctccttgcttgttcagcctgctttctcatacaacccaaggatgggcctcccatatgtgtgtgtgtgtaaaacctgacatgcttgcctataggtcaatcttatggagccatgtttccatgttttttctccgctgagagtttctcttcccaaatgattctagatcttgttaaggtaacaaaagttaaaaatttttaaaaatcataaaaaatgcaggtaggacaggtgtcattgtagatttgaaattagataaaattaagactcagttcttcatcagtgttacctacatgtcaataacttaatagtccctttaaatggtggttcctatgttctaaattgtatacataaagcatttcatcattctagaaagttctatctgctcacaatgctagtgtgtattcatgatgtgttagcaccatggctttccacctctccatggaggacacttctacatacaaaggagcttaacaaaagtttgaattgatttttaagaaattgaatgaaaaaatgaaataaaaaggaaaggaaaggaaagggcatgattgctcctagcatggcagaggagaaagtttattatagctatgtgggagagcatagtcagagacagacacgtctgggagagcccagagtagacatgactctgttctgtgtggggagaggagaggaagggagacaggaaagggggaacttgatacagcagccaggaggccaaaggtacaaaagtgacaggtaaccaaaccaaaatgcctggattatatagggaagagtccagggtcttgggtgggataccccagccattccctgtaacaggttaggactgagggatgctgggagaacccggaggcaagggtctgctttgacatgttgataagcatctcggccatttgcacaggtttgaaacttagcagtaagtctatcttttaaagaattagatagttctcctgggatcaccaagagggctcagtgggtggagatgcttgtcagcaagccaggactcattggtggagagagcaaaatgacttacacaagttgtcctctggtgtttgcacatggttgggaaggcaagtgtccaagcacacagacacacagacagacagacacacagacagacagacacacacacacacaattaaaagtaatattaaaatataaaaaacaataatttcccaaaaaactcaaaaacctttctatccagatgttagaggcacaagtctttagtcccagaactcaggaggcagaggcaagcagatctctcagacatctgagccagcctggtctacagagtgagttccaagatggccagagccatataaataaaccctgtcttgaaaaaccaaccaaccaaacaaacaaacaaacacaaaaataagacaaaacagcaaggacaaaaaaaccttccatgaatagatggttgagaaggcattagctaaaaatggctgttgagaaggaatcaccaccccacaatgctcaaatttagtcaagtacatttaaagccttgacatcctaagtgtaaatattacatattttattatatattataatatcttacatataacatgcatatagtatgtatacaatatacacattaatattttacatatatgaaacattgggtctgactcagagcctctgcttgtcaggctccctgctctggggtaaaatggccctttaggtgcagcaaagaaaaaagaaagctctctggttccctctacaggatggctctggaatttccgtattgagagtaagtagtgggttagagaatactctagcttcaagttcctgagagcccttcattagtagaggtaggctaaccttgaactcacttttcgatctgccatctatgaccataagacccctcctttatctccatcaagaggtcccagcactggaagggcagtccccagagccctcaagatcacctgcaccacctaccaaggtggcctaaattctagttttagtttcttcagtttctaagcccaagctttctaaccccctccctttagcttgtagctttatttaaaaataaaatgggggagtcggtccatgaggctcacatctgcaatcccagcagtaggagacctagtataatggcacatgcctttattcccagcacttgggagacagtggcaggcagacctctgtgagtttggggccatcctggtctatatagtgagttccagggcagccagagctacatagtgagactctgactcaaaaaataaaacaagacaaaagcaaacaaacaaaagttcaaacaaaaccaaaagacaaaataaaacaaccaacaggaataataaacagggaaaaggaacaagtatggcttctcttcttggtataagtacgccagtctttagggaagaaagaaaaagaaagaggaagaaagaggaatgtacaatctaaaagaaaagttgcttctatgaccaaaataaggctggatgtgttcatattgtgcatatgcgtatgtatgtttgttattgtgcctataattaataggagtaagtggtctaccaagcaagtctgagatgcatgtcatttcaggtccatttgaggaaaccaagacttgtagatgttaagttactaattgctgagaatcacaaagttaagtggcaaagccagcctctaaactcaggcaacccacctccaaagtccaggttcctcctgtaattctatgctgctgctcaaatgctaatcgcacccaactgttatagttacacacaaaaggagtaccatccaaccaaactgactgtgagatgcagccttcccttgttccagtgacctgacaaagccagagggaccttctaacagagtgttccacatggtcccagttgagaaaaaatgaggaagaaaaatagaaaactcagtcactatttaaagcctaaattaattctagttctatgactaagctggcttttcagagatccttctctttgcagttggccttgtagagtaagaaggtccattttaaatacatttccagattcttaataaaaaaaaatagttaatgtcattactgttggtctgatttgcaatggcattagagatgtgtgctcttttgatctaaatattagtgttcgccaaattcacatgtagaagcttcaccctaaacctgcatcgttagaaggagtagcatctagatggtgattaggtcatgacaatggggcacccagaatagtattactgcatatgttggtaccttgacccaaggacacttcaccctccagatttgtgagcaatacatctatgttgttataaattatccagtaaaggtattttgatgtagatgcttgaagggaccaaaacatagggccacaccctttgtttgaattttttgagagggaaagagagagagagagagggagagagagagagagagagaaagagagagagagagagaattcattgatactgtgaacattagtaatagcattgagactaaagtatgattaaagttgctaaagtgtggcgagataaataagtcctttgctaagctctgtctccatggttggactttgaatgaaggcagtcccagcaaagcagactggtgaaagtttagatgaatttcaggaagcagattgctgttctggtagctgctgtacttgctaaatctgctcctggagaaattacacctcttgaagagatttccagttgtgtccccttgatattgctttgtcagggatgtgctttaaataagatgtcctccgtagggagcagggattctaaatcctcatcgacttgcatggctgttatatgccaaattggaaataacttcctgaaatgaatgtcttcaaggaatgaattcagcaggaggttttcacagatgccagaatctcttcagatggttccgcttgaccggggtgttattagaacaatctccttgggcaaactaaatctctgggactggacatatttacctttgcagcatctaaaaacatagcaataataaaactctcaattcttccttgagatctaagcctgatagtctggcctgggtagtgaaatgggaactgagaactgaatgctagttagaagctcagggacagaatagctcttattcaactgctcccgtgtgttcccgtgacttaaccgcgggaaggtgtgcatgttgccttgtgagacaccaatgctatattcaaatgtgctcgttatgttacagttccagcaatgtgaaggaaagctagtatctgagtgctgagtgggttacagggctctaaagacaaatggtttttttccctagggagttagaactgaagctatcaccaacatgcctgcagacctggagacttaggaagtgaaaactgtcaatctaaacctccacaccttgctttcctaaagagagaatgaaggatgcttttacaatctgtttcttatgcaggctccaatgaccttagcaggattttagaatatcctggagaacataggcacctcctactgctgaggctagactgcatgtatttcaacttgcctatataccaatcagagccaccagaatggtttcagattccctgaagaagtccagtaggcagccagcattgaggaatctctcacttgatgctttttaaatgagaggcacataccaaaccttaggaaaaaattttatacacacaaacatgcacacgcacgtgcgcatgcacacacacacacacacacatacacacacacacacacacatacacacacacacacacacacacacacacacacacacaccttctaaaatctcttgttagaccctctagagacaagtaaggagaatttttatagagcacagatgaacatggatggatattctagaggactgcttctgaaacttcagtgcctctcagaaccacccagaggtctggttcaaccccaggtttaggcagtgtgtgtgtaaggcacacatacagtgcgtgtgtaaggcagtgtgtgtgtaagggcagaggtagagggttttcctatagggtcccagcgacgaaggtccagaaactgtgctttgaggtctgtgggtccatcttactaggatgtcgaacttgaattctagaagtgtctgctatgccaactatcaagattctcttacttccagaaaccttgctgttttaggcttccagatgtcaggttttacagaaattctgtactttggggactgaagccaaagcattcacatattgagatatatctagtatattgtatcccacgttataacttcaaatggatcagttaagcccttttagaaagtcttcggtttccttctgtgcagttccctttaaagctcctccaagtcctaggttgcagcaagaggggatccctggctcttgtttctttccacgtttggttgatgctcttccttcccaacctcctgagattgggttagggccagctcgtggcatgttggagataacagagagaagactgctaagggaggttccagactcacttcttttccgttctctggggtctgacctgtctcctctgtcaaggatagagccccttagactgccagtctcgggaataggtcttgtatggccttattcctaggataactcattttaactagctttattctttctactttatcttccctggagataccttaggcctggagatagaactgcatggtgggtgatagacacctatctccctttccctaagatgtatttgttattgatgaagtttaatactgagataagtgactctttgattacatatcagaatcacagagttcaacttctctttctctctctctccctctctctctctctccctctctctttctcccccctctctctccctctctctttctccctctctctctgtctctccctctctctctctccctgtctctctctttctctctcttcctgtctccctctctctcttcctgtctccctctctctcttcctgtttccctctctctccctctcctctctctcccctctctctccctccccctctctctccctgtctctctctccctgtctctctctccccctctctctccctgtctctctctctctctctctctctctctctgatcaagtagcaatgtatcagcctgtcttatataaggtaaaattaacttgatatttcctagtatacaaaaaaaaatattcccctggccagattggatgtacccttcctcctcctcctcttcttctcttgcccctcctcaccctccaccccatactccccatcccccctctttactctccctctccccctctttcttctcttttcatacgaggcactgaacctagggtcctgctcatgcctgtttggccatgaggatagatcctcgatgccctttttactctttgttttgagataggatggcactaagttgtccaggctgtctatgacgtcactaagctcagtctttgagtgagctcctccagcttctgctcctagggcagctgggattgcagccatgcacatagccaggctctgacgagcccttcttttttgtcaaagctccagtctttgtcttacactgtctacagtcccctttcgcttttattaattgcctttctgaggatctcttttcccagattccagctatctggttagcagttaccagttactaagctcccactctgcttgcccatatactccttctctatgacttccatagtcccccattactcactgcgtacctgaacttaaccagactagctctggcctcattcaaaactgtcagtcttttcattgtaggttgtctttgatggggctgcacatctacaagtgatgtatgcatgtccaggaccacaactgacccactgcctgtgtgtgtgtgtgtgtgtgtgtgtgtgtgtgtgtgtgtgtgtgtgtgtctgtgattatgagagagggataggaagggagagaggagagaagaaaagagaatgaatgtgaagttgatctctagttttactatttaggaaccatccacctggtttattgagtcaataggacccaggctcactgactgggctcatttgactggctagcaattcccagagattcccgtgtctcagcctccttggtgctaggatttgcaagtgtgagacactgtgtccagcttttttatgtgggtactgggaattaaactcattccctcatgttggtgtggcaagcactttttgaagtgagcaaccttcccggccctccactgtttagttttggaaataagattttattggaacacagccacactcgttcatttacatattgtcagtaatatggagacctggggggtcacaaagcataaaataccatttacttctttgctctttacagaaagcctattgatagcagatgcattatacattcctttgtgttcctctaaatgcctggcacagtgttttgcttataatagctacaaatcagttttgataaatgcaacatgaactttcctctgagatcattggaactgtaatagtgataaaacaaaaatgtgttttggcctctgctattataccactgtgcattacgtggcagcatcagcataagatccctatgtgtctgtctcctttactgttctacaagctctaatgataagtggggggacctggaggaggccacctgtcttactcactaagacattggcacagcaagaatgtgaactgaggtctttgcagtctcagggcctaaattttgaattattacttgaaatgtaccaatcagtcctagcccccataagtgacgagaaacagaaatcttgaaaaatccatttcaatgagctatgacacagaaaccaaacaagcataataaaggctaagacatgagtacaacaggggatctcagaaggaagggctcaagccttgtttcttgggtgtttcacctaactcacgctagtgtaaatccttcttttaaaatcctgcatagctgtgccattatcatgagcatcaattcagatgttcagtcactcgacaaactttaaagcaggtagaattataatgtgttagttgctgtactcagcttcagtttaaggtgtgaacgcgattttcctgctgtagaagaggagtacgcaaactcagacttcaaacccaaatacttatagggaaagggagataacaaggagatggctcatggtgctatgaaaccagtctctctagcaagggagagaggatgcttctcttcttaaagtggttgttggctgatctttttcaatgtccattaactaccattctttctccatgtccttctctgttttaaaggctggtgtgtgtgtgtgtgtgtgtgtgtgtgtgtgtgtgtgtgtgtgtgtttatgcttatgcttgtgagtgagtacccatgcatgcagataactgtagatgccctggagctggagttacaagcagatatgagctgcaagatgtagttgctgggaactgaattctgatcatctgtaagcacagcaacagctcttaacccttgagccatttcttcagtccccatctaacccctgcttctttttcttcctccttgtcagttatccttggtactttcctttgggaactgggtaggctgaagcatcatttatctgttcaagacaggtgacatcctggtgtcctatgtataggacttgtcttccttcttactgtatctgctgtccagaatctattaccaaacctgtaatgtggtacctgctggcagtgccaatcaccacacatcatatcacctcacatataattaaaccaacaagcatttgtattaggatgagtaaacatttttgatgaatttgaagacagggtcaaacacctttcctaccccccaaatgttacgagcaaaggactcattatctgaggacctcttgttcctggtttaacaaaatagctttgtgtttgttttatctaattgcagttctccttattcaaggacaggcacttctcatctggcaggaagagcaaaagcttggctccaccagcctcctagaagtcttattgaagatacaggaggcattagtcctctggtgcattgacctgcccagggggagccccctcttcccgcagcccaggctgttcccagtccctcacttcagctctgttgcatggtccacacctctgcatctgttaagccattctgccatctagtgagggaaagcaggagtgtcgtcctgagaagcctgtgtcctttgaatcctgactgacaaacctcagatgaaactttaacttttagagggcaactcaggagagtccccagcctacaagaatccctccaaaaaaagaatagagtaaaagacagatagcatgtacatagctggggttctgaaagttggcccttatgctcctgctgagcacagactggcaccccaaccacccacccccatctctgtctaaactgacacacaagggcaagtattttagactgattccagattaaagattgcacttgattttactaaaatagatcactcttgtccaggtttgttcagatttaagtcttccttctgtctcttgacagaaatggtttggagcctgaaagaaatactgtggtgagctaggatgtactaggatggagctgtagtcttttaggtgctgttatttcaggtattcttgctgggagctgtgttagtgtgcaattattattgactaccatttggctaggtcccaaaggtctcctttgtggaagataatggtacttttcatagataagctaacggctgcataatacaaggcaaaaaaaaaaaaagttgtgaatattcttaacctgagttgtcaccgttcctatcaacttgtttataggagaaagaaaacctctttctgctgctttgctcattgtctctctctttctcacatacatagaaacacacacacatacacacacacacacacacacacacacacacacacacacatatgcacatgcatatgcacacatttagatgctagagaccctgggacctggggttcagtccacttttctttgaaatggtctcttatgaaatgaggagtgagctgggtgtctatctatcccctgactcctcctcccccagccaacagctttttaaaagagtgttctggagatttaacgtggctctccctgcttgtgagtcaaactctttccccactgagccatctcctagacctgactgttacctactcccggtgcctgacccctgcattttgattggtttctttgaccacctgcttggtatgaagtgagggaaaagaatatatttaagatgaaaaaagaagtggcaacaaaaagggtcagagccataacccaagaagaaccttctagattcatctctgttatatgggatatgcgtagctttccagggaaatgtactagagtacagtagttggcttccttattccaggaatcccagcaggaatcctgacataggtatggttgtctggggagcatggtaaggatggctgtaaaaccaagaacatgcaggaagaagaaaatcaaatgccttgtgtttgcaaatgtacttcattaagacaactttcctaaggtctagatagcaaaggaaaacatgtgcttccagaaagacatgggtgggaaaagattcctgtacgcaggttttggggctccttatattccagaatgtgtgtgtgtgtgtgtgtgtgtgtgatcagtcacatctgcatgggagggagaaaaagggcagagaatgctgttcatatgtttgtgaatgtattttaaaatagccatctctgttgaaatagcaactcagaagtgtgagcggaggggacgtcttcctgatggctagctctaacaggctgattggagaagtcagtggtatctttccccaaatgccaggtgttcagcctggccaccattcatggcaaagatcttgagcgaccttggattaaagccccaaggttcattttgtctgtcatcagtactgatttgtgggatgcactggcgtggtctgccttgccttgggcagggttctctctgttttaatcacacagctgggtggtgtactgggacatctagaaggtactgaatgaaagccattgagtgagcaagggagtggtaggataatcagagagtccatttcctattctgtaggacagaaatcagcaaatgtttcctgtgacttcccaggtagtaaatatcttcaactctgaagaccatccaattaccattaccacttttcaacctttcactgtggcctgcaatcagctccatccaatatggacttgaatgagcagtgtgaagtatataattatataaaaatgtccataggtgatgttataccatattcaatgaatacgtacaatgacaattaaaaatatattcatgaacatttaagttggaagtttgtataactccaaggtttagaaatcatccatctgatttttaaaatttatttaaaaacatgaagaagtacattcttagctctcattctgtgcacaagctggtgatggcctgcctggatgtgctcccatgtcatagttcacctgcccttctgtagaggattatatacatggttaggttagagactgtatggagtgttaataaactcattcatccactcaaggctttattgaatacttttggtccctaggcactggatgtaccaacagacttctgattagtcaccagcccgaggaagaggtccttatctttgacagctcaggcctcagaagtatgagtcacgacattgtagcaaataagaacccctcagtctaatgaatgtgcatgaaacactttaacaaattagccatttctacccagtgcctgccatatgttgccagcatctttctggcagtccttatttacagactggaaaatcggtggagatggagtgattttcccatgacctctaactcagtctcatgcctaacaacttgctgctggttctagcatattggatgctcactcaagagttctagtgggctttcagatacctccccttgaagatcaggaagacttagggaaaaaatcttttccccctcatttggccccattcttcccattctctaccttgatcaaaaccagcaatgaaaacaattcctctctcaggattatagtctgaaaacagtgaattttttttgtcttgtctatttcatttcctgaaaacaaaaatagcctaggaaactattaaatacaacagaagcaagtaagattggagcattggaaagctttgcctcatgtttttcctgcttgtctgctttgggcctgccttacttaattcaataatctatgcagcttgagctctggctagcaatgacttcctctgccaccaacaattttgcaatcctcctgaatcctttaggggattccaaggcaaatggccttaaacaggaacttaattgtctgagagattttatttgcttattagaacagtttggtccacggcattatctgtatggggaataattcccttagctgcatcaattttatagtttctagctcattggattgcagtttttcctacataaaaggatgcctggcatggagccacccagagtgacaattttgggtgctttttatcacggcacaaagtaataacaacgtgagcagcactggtgtctctcaagagctcaagaagaaggcaaaggggaaaagggcaggatttagagatgtaatttgggattaataaatgattcatccaaaagatcagtattgatcacagctctatggttgtgtgtactgtgagattgtaagacacagttcagccaggaataccctgatctagttatggatatgggaaatcaaagcaccacgtctacaatgggaatttaacatctggtgagtgaatataacagagaactgataaagtattcaatagaacactgaaaaccagacaggagaagttgtgcatttaaatgcagacatatgtttgctttggctataagccatatgttgcttgtgcaatacataaagatatctatgcatgcacataatagagtccaggttggtagaatagtaactggaagttggaatcgtgtacttggctttttcttagaccatggagtgattggcacaatgagatagtcaatatcaaaccaaccatctatgagactccaaatgaagaaatcttacctgccttgctcactatgctctgaatgaatagtcaccagtaaaccaggtggcatttatctttatagcccagactcttcctttaaagaccatgatgcagacatgggtcatagagcaggcagacactgtttccctcaagttagcagcactggtgtctttcaatggagggacgagggaggacatgaccagataaggggcccgataatggggaaaggttctcaggttacctagagcttccaatgagaagcttaatctagacatttgtgcttatgtgtagggaggtaggtaatagagctgtagtgtttctgccaagagctatacctggttatattcagtggatgaaagcatcatgtggagagtagacaatactgataactagactcataagtgagagcctgggggtcagctcccttcatgtgtagttcccggtgaaagtgaatgcagtcctaaattatcggttgttgagtctcctgcttggatctcttcgaattgttaatttgaaagaaggcttggtgccaagctgaagtggccttgataaccaatagaaatcaggggtcattaggactgcttgagtctacttaggaacatttataaagcacaaagcatccacacagacgctccatctagaaaatcttttaggaaaaccattatagtttgattggcgttttgaagtgggtgtcattgttcctttgatttggcaaatatggacaaggatgttttaagaggtgattagaacaggaaagtatacaactagtaaatagcattaccaagtctatcactgaaggcctgataaactggtgaccttcttaatatgccacaagagctagaagatagccctgctctgccagtaagaactaagcatatcttctagcgcttctagtggaatgagttattatctgcttttttggccacaggaattacatattttaagttgaggatgtattaatgtacctgtggatgtggggacttctgggagaggtagagtttaattgagccttaaagcatgggtaaagaaatggaggggcaaagggggacatggcaagataagagaaaaattatacatgggagaagcacctctcttgggctatataggagattcagtgagtatgtaatccacacttttttgagtgcctatagagaaggtagttgatagaactgcagtgttacttctatgaacaggagtgtatgagtctgggcaggcctgtctgtgaaaatcactggagaaaaatggagacaatttcagtcattatctaagacttaatgcagtattgaggatgtagtagggatgtgtctattgaatggtccaagatgatctaaagtgcagtattggatgagtggacaggtaggagagttccacctactatgtatctacagaagagctttcaagtgagggatgtaacagtttcagagaatggcagggcaggactagagagcaaggacaacagagacagccagggtcctaaggaaaggatgagcaaagaaaggcagtatttggctgggtggacacatagattctaggacttctcttgctagagaagaacaggcagatggaaccaaatgctaatgccttccagtgaaccaaaagacgtaaaatatgatgagaaaacaagaaaataggtgcaacataggttgaggggaagcagaaggcacaggagaatgtttccatgtcagacagaaaaggaccatctggtccaaggtcatctctacatttccttaggcaagccctgggcaggaatgatgcagctctgggaagctttccaacttgaaggccaactcaaagcccatccttctcagaagaaggccaaggaaacatctatccaagactagatgcccagttatttagaaaggaagagaaatgaccacaatatgctgcagagaaaagaagtgatggaattcagaactgttgttttcctaaaacagaagccagaaatgaactatcttttaataactgtcttggtattttattctggggacttaggaaagggggaaaaagtgtatgagaataccttcagaccttggatggtttatggtaatgtttgaaattgctggtaaaattatgaccttgtaatttacggctgtgtcatatattccaggccacagtataatttatgtacccagccaggtcctttgaaaatgaataggggggagtctcacataatacacagtttataatgttgtgctgttcttaatgtaaaatatccttggcttaaacatgttgtttaatggggtttattgttggtccagggtcattactgaagtttctgaagaatagggtggggttttaaggaactctaataatgtggtcatcttcgctggtggggctgctgtactcagagtactcaagcctctctctttccctgtctgtatcaccccaaaagaagtatacaaatccttctcttagtacaaaaactgggcagctagataagtttggccttaacacaggctttaacctgatcaaaaacttaacttccttaggaaacaaaacaactgttagatactacaagtggctcaaaccaagctccttgcatcattttgacattgaccccagttagagtactggagaggaaagaaactaggagctagctaggactgctggagacaggatggtaggagatcttacctccctgaaaaggcagaaggacaagagaagagagtgttctgccctgcaatcaagagagagaagtcccatgtctgaggctcagaacctccttgagggccaggttatagagccaccactctgggggtgatcttggacagcaacctttcatcctcatctgtaatcaaggcaagcttctattctttgttacttaagggaatcattgttaggatcaaggaagagttttgtgaccctgatccagtgaccagagtcacctctttcctcttcctatttacttccccactaccaccaccctgttacctgtacctcaataaagcttaacgacaatgatccgacgaagacctccttctacattagcctgttctgtctgatctcctttcggtcgttttagtcattctccactgattcttccttttggaaacctgtacccattcctgtcggcaccccaacccctgccatgacaaggccacctggttttctagatctgactttcgatctgttctgctctctccttgtctgcccctgtcttctaagtgccagaagtgttgataagaactgcagcttgaagcagagaaagagatgtgactgtgatgcagtgaccagggccccagccatcttggaacaggccccaggatactgttcccattaaaggcagtggagcttggaggcactgcagccttgtgcttgggagttcctagtttgtccactgagctgtggactttagcttccctcaagggaaggacaaggggtcaagtgttttgcttgattcataaaagtgggtccagatccacttagctcaagttaagggagctcttatttggttccatgtcttttattttatacagttagataagcctgggcatcttcaataagtattttcaaaatactattttgtacttttattttaaaaaaataaggaaagaaatggaagtggacacaacaaacaataaaaaaaaatgattgtatcacttggagatgattgtatatgtggaaagagaaagaagtcaaacaactatggcccattcttattcatagtcctagcacttagggattggagggaggtagacaaggcttagaaggccaactttgacatatgagaccctatctcaagctgaaaaattaaacaagccacgcattatatatatataaatcttatagtatattgtagtatacctggtttttagaagtaaaaatgttaaatttgtttccttgagcatagaaaaaaaatagagaaataggaattgctagttctttgtccttaagacattgctagtgtggttgtaagaaagcacttcagaaaaataatacagcagagccatgttttcctttaactgtagtgtttgctccactatggtgtgggtggacttttggctgtgaatgaagagaatatggatgtatttgcctttcctgcagctcctgcccctcatttgctaaccatattatcttctttactttggtcctataacctccccttcagcttctgtgatgcccattcttatttggtcttagcaaagtctttttaggtgtccagcattcaagctaggtatattttctacagcatcttctactgattccacttaactccttatggtggagaacctccctgaggacaaaagtgcttgtcttaaagttcagggtcatgaaggaccatgtttctggagcaggatgaaagaagtagcctgagcagtaaatgaacatgcttagaacagggcagaggtcagccaatagcctctggagctggaccatgtagccttgaatccccttttcatcccctgatgtctaggtagctgtaagaaatctgtttcctctttctctgtccctcctataagatgatctaaaccactgtggtggtttgaatatgcttgtcccagtgaatggcactattaggagttgtggccttgttggagtaggtgtggccttgttggaggaagtgtgtcactgtgggggtgagtaatgagaccctccttccagccacgtgggagccaatctgttcctggtttcctttggatgaagacgtagaactctcacttcctccagcatcatggctgcctggatgctaccatatttcctaccttgatgataatggactgaacctttgaaactgtaagccagccccaattaaatgctgtcctttgtaagagttgtctttgtcgtggtgtctgttcacagcagtaaaaccctaactaatacaatcacctttcataagatgttgtgggggataaaaggaactgtaaaaagtagactgaagaagggttcaaccacagtaagggtttggtgattactcttcattcatgtactgggctttgcatggcaggcattagctcattgtgtagtcactgaatgctgcctgtgggcctcctataggtcatgatctctaaactccttaagcaagaacaagatagaggtaatcagtgactgagcagcacattggcccctggcccctgcaataggaaagccacacacatggacatgtacagtcatgtgcagaaacttgctgcctgctacagttccctgggagcctggtgcttcagttactcctgatgacacttgtgtgcaagcaaattctttattgctgctttaaacgtctctcctttcacttcctcattcccttcctggggcccatgagatcgactccccccaaaaaaacataattagagctgtttttttcaggttctacttagtgggggcaggcaaactgcaacatcccactttctaaaacaacaactatatatgctcatactctcacgcacacagaagggaagggagagaatccagaaggtctctgtatgtaaatggtagagccaagatttcaatgtaatcaagactccaatggagtacatatttcatggcttttgttatcccaggtaataaactgacaaggtgtaagagatgtccttgaaccccttatctcttgcaatatacagaaataaacagttccagacctgtcttcgcccttagtcacagtaaccgctcagttccacaaactgtctgttgatggtgatggagattgacctcttttaagaccgggagtccctttctggatcagacttgtactgacctccatatgaggagttattatagtcagctcttttgtgacccctaagaccccaaggaagcaactcagcagattgattttgaaccagatttctgttcatgatacatgcaagagaaaatggcaagatttgccaatttgatgattttactgcctgggataataataattaagaaatcctctctcttaattagcaagtacaattagcatttctataaaacgatccatccacaaggtgaatgcgctgagatgtaacatcttgttcctgatgctgtggtgctggggtaagtgggatcattcaggaattaggaattctaatgagccatgtgcttcagccttcaagtacataggcccagctgggagggcagaatctgcagcagccaagagcaagtttccatgactgattcagtgctcagagaaggctcttgtttgttcccagttgcaaaggagccatagaaactgcaggtttatgggggtattttttttaacttttttttaataccttggctatgtttagtcctaatatttctttgtgggtcgaatgaccttctgaagcagagagctacagtgtggagaaacttgatcttgtgctagcttttcattactttgacaaaacacctaacataagggacttcaaggccaaaaggtttatttggttcataggttctgaggtcttgttgcatggcctgctggttctgttgcttttgaacgtgtgaggatgtagaacatctgtgtaggagcattcaacaaagcaaaactgctcaccttctggggactggaaaagaagggaaacaggaaggggttatggtctcaaaagccccttcaaaggcaagatctcaagatcaaacagccttccaggtgtctcagcttccaaaggcttcaccactttccagtaatgcctcatgttggcagccaagcctttagcatataagccttggtgctggggagtcattctgtaaaacggttgctacacaaaccttgggacctagtgtggatggatcccaggctccagggccaaagctgagtgtggtaaactcactgctggggaatagaagatgggctgactactggagttcaccagacaacttctcccagccacaggaacttttaagctatactccagatccaaactaccacagatctagaagggacatttttaggtcatctattaccaaaactctcaggtccctcctgtctcttaatcccaaagggtgcacagggctccttgaaggcaaggccttgagctgaagcacccctgagagactacttatttcctccagttgccatagtcaccagagacccccagtttacttttgattgtccttttatttcccttggcagtgctgatcaaagaattccatgcaaagacatttgaactgccaattgccctatggttttgcagtatctgcaggttttggagagctcttagaatacagagtgtgttgcaatgagtgactgattattattatttgctttgggggggggttactatttatacttctagagagacagcatcatgccttacagtatttctcactgagcagctctcaggaaaaaacttactgtgtaatatagatgctgcagcttaaggctgagcaattcattttttccagctccattgtatcctcccgcttagctcactgggtgtgaaatgcacgcgtgtttacttcctccgtgggtcctccttgcagtcagtacaatgactattaggcaggcatgtgatggaggaagaagaaaagaatggcctatttcatcctttaattggataatcagtccagaataatggtggtttgatttgatttgcaggcccacagtgcaggctgttggtaacacacacagtataaactacaaagtgagtgcagcggacatttacgcttgcagttccactgtggtgggaggggcggctccacgtactgagactgataaagcagtaaatgtaccttactcatcttcacataaatcatgaccctgcaggcattttcatagtctgagcccaagaagctggagtttttcttatctgtgagactcttcctgtcatgtgtaggttgtacacaaggatcaagagtcagtgccgaagagtgatccatcttcatcagtgggacaataagatgtgaggacatctaagatgtcacctgttgccacttgaccttaaggctgatgctcttgggcctctcccactggttccatgagaggacggaaatgttagtccctatcctcattgaatggttgaggcagacagatttgttggttaatggttaatggttaattgacattcctgacctccttgtacctagggggcagctaggatacaggatgcagtttgtgattggacatggatattttctgaggtagtgggtgtgaacacagcatcccagcagtgaaagaagctgcctaacataatattttaactgcttaaatgagtttagaaaatatttaataacaaaaggtgagcatatctcttttctcattcctaaaaaacttcatgtatttatttagagatccaatctgtgtcctgctgccccagctttcctagtgtataccagtaaacagagttttaatagccaattagtgaacgtcaccaaaaagtggatattagtgacaagagtaccgataaaaattttatacttactatatggaaaacaattgctaaaataagtacatgatgcaaagactttagaattaagaaaagggagttctagcttagtttaggatttaaagaaaaaatttatgcatacgttttgccagtgtatgtgtatgtacaccccacgtttgcctggattcccttgggtaggcaggagaatgtataagattctttaaagctggagttgtggatagatgtgagccaccatatggttgcttgatcctctacaagactgacaagtgttcataaccactgagctatttctccagtccctctagcttaatcttggctggagtttttaacaagaccaactagaatttcaaaccccacattttgagaggcagctacccattctttgcaagaaaccaactctcttttaacattttacattacaaagataacccgaaagcgctcctgtgtggaaatcagaagtaaagcactctagtccagcaggctgactgactctaagcaaatgcaaagttcctgactctgcttcctgctgctgatctcaaagtattcagcatttgcatgagtggaagttatttatatgcacctgagttgttctaggaaaattaaataagtgaatcttaggtgctattgtgagtgtttcaggaaaaagaaagagttaccaataggtgatcattcccaacatctttccttttttttccccactttcttttaattagatattttctttatttacatttcaagtgttattccctttcctagtttcccctccgaaaatcccctacccccttcccccttcccttgctccccaacccacccactcccattcccagtcctggccttcccatatactgggacatagaaccttcacaggacctagggcttctcctcccattgatgaccgactaggccatcctctgccacatatacagcaagagcaacaagtcccaccatgtgttttctttgattggtagtttagttccaaggagttctggggaaattggttagttcatattgatgttcctcctttggggcttcagaccccttcagatccttggatactttctctagctccttcattgggggaccttgtgctctgtccaaaggatgattgtgagcatccacttctgtatttgccaggcactggcaaaggccctcaggagacagttatatcaggctcctgttagcaggctgctgttggtatctgccatagtgtctgggtttggtggttgtttatgggatgaagtccccaagtggggcagtctctgtatggttgttccttcatcctctgctctaaactttgtctctgtaactccttccatgggtattttgttcccccttctaagaaggattctaagcttctgggctaatacccacttatatgcagtgagtgcatatcatgtgtgttcttttgtgattggattacctcactcaagataatatcctccagatccatccatttgtctaagaatttcataaactcgttgtttttaatagctgagtagtactccattgtgtaaatgtaccacattttctgtattcattcctctgttgagggacatctgggtttctttccagcttttggctactataaataaggctactatgaacatagtggagcatgtgttcttattacaagttggagcatcttctgggtatatgcccaggagaggtattgctggattttgtggtagaactatgtccaactttctgaggaactgccaaactgatttccagagtggttgtaccagcttgcagtcccaccagcaatggaggaatgtgttcctctttctctacatcctcaccagcatctgctgtcacctgaatttttgatcttagccattctggctggtgtgaggtagaatctcagggttgttttgatttgcatttccctgatgattaaggatgttggataccaatggcttgttctgtaagatcaagaatcaacaaatgggacctcataaaattgcaaagcttcttctgtaaggcaaaggtcttattctgccaacaagaccaaaaggcaaccaacagattgggaaaagatctttaccaaccctaaatctgatggggggggggggggggctaatgtttaatatatataaagaagaagttggactccagaaaaccaaacaaccctattaaaaaaaatgaggtacagagctaaacaaagaattctcagctgaggaatacagaatggctgagaagcacctaaaaaatgtcccaacatctttcttagggaagctgggagaacctgttgatccttagtcactcctttctcccttccaagcattgccttcatcaaaaggtgacaaactatgacttgttgactgaattggatccaccaacctgtgtgagggaataaatttttttggctcatagccaagatctttattttcatattttttgtggtcagtttttgcattcctaaggcaagactaagtagccatggttgaggttatataatgtataaagtcagggttactcaccatctgttttctctctctctctctctctctctctctctctctctctctctctctctctcacacacacacacacacacacacacacatacacgcacaaacacacacaccactcgtgtgatgcacacacacatgtctagtttggattttctaagctgatggcgttaatgcagaaccttggaatacactagcaaagtcagccaggacagcacctcctgtcaaattgctctccgcccccaccagaggtcacgccatgtccatttcccaggttcgcctaaagttaattttgagcatcagaatgaaacttagcttaatcctatagtaaaccgggggcttttgcaaaatgtttcttctgacctaaggttcagtgttctgctgttctgctttcttcttcttcctctctctctctttttttaatagagaaagctaaatcaagagttcccacttggaaggatcacctctgttctttgtaaactgtaattgaagccataattcacccagctcctcagtctttactcaaagcctctggcaccgacgctctgcttggatttaattctagaatgaggttgatcgtttggtcggctttgtaggcttttcctgatcatgattattacaacccagtattcttcttccttgccgtaggtgacaggaggtgtgaggccatttcagagatgaacttccactatagactcattgtccaggcagggtgagaccagcgcaaagcaagggaaaggcctggatgtaagctttaaggaggctcctactctcaagactgttcaagtacagcgtcaccctgaaaaacagaatgcctccttcaattttgttctgaaagaatcttcttctcattcctctcctgattctgaggcacccaataatgtccaaccccccctacagttagaatgttttgggtttgtctttatgtattccttgttgctggtgtttaaccatgtagatatatttgggcctgcagtatgctcaagtccagatctcaaaaaaatctaacctatgggtacttcagtggcctcagatggccatctgtcacttataggtccaaatgttagtccggagggaagtgtagggccatgtgtcagcttcccagttggggctccctacaggaatcagattagaggggattattccacttcttttcttgatctctcagggcagaggagattgaatgagtccagacagttttatccccaatattacacacattatgccagtccccacagtgcctctcaggccattgccttggaaacggtagcaacagcaaggaccagcaagttggtgatgtttatgggcatctgatgaaggggcgggggggcggggggatgtgctggatatgatttgctagatgcttggttaatcaaggaggttattgttcaacagggaggaaggatagagcaaaggggaaggagagaaggaccagggagatgggtaagccatgtgactggagatggggcaagagtctcctgaatagttcagtcaaggattcaagagaagcacactcttccttgtatcctgagtgctgatcacacaacacaggtgctcggtccttggttttagcaagagagaaaaggagttgacccaatggcattgagtttgaccgaactggaactctggtagtaagtcatagcataaggaatacatgtttggttataatagatgcagccttaacattcatgttctctgcttcaaaccacaggcattggttgactctttaattggttaagcatagaacttacttgccaacagcagataataggctatcagttcacttctagcttcagaattgacctccctccttcccttatagctttcttcctttatccacattcctctcccactgtggtcaacaactctcagaaagatgtttgcttcagtggggactaatccattgagcacctgcaagggactttggagaacaggagtgattatgtagcatgctctatatgatgagacatttgaaaacacatatgagatccactaatcatcacagtcttgtccttagaaggatgatgctgtctttagcagtaaaaggtttgcaaatgtcatagaaccagccttcagtcccaccgaggagcagagctggaattcagtataattgtctgaccctagatgtacctcctgcataataccatctcttttgaagagtatcagtgaacattcaaggaaagagggctaaggtggatattcccttaaagtaaaactaaaggtgagcatctttgtaacaagatacctgagatcactaggcttatttccagttcacagtttggggactcagtctatgattcattgctttaaggtctgtgaagaggcaggacactgtgtcatgagaatgtagcaaaacccttaactccatggctaggaactattaggaagaagaagaacctagacagtgtcctatgatccccatttgtccccagggacctaaagacccctaatcagatgcctacctcttaaaggttccattgcctccagtaatgctatcctgagaaccaagctgctaatacatggatctttgagggatatctgacatctaaactatagcgctagcctagctaaatacaaagatggatggtaatgttctctacaagatgggaagctgcttgaagactaactatttgatagcaattcacatttgtatccccagcttgtctggccccatatctccctcatattaccaacagcaacaagcatatctggaccacttgtgttatgtgccaaggatgattgtgatggatggtgtttgtttgtttcctaaaacagctctactgagctactttgagttgaagaaatgtgccatagtttattcccaaatactagctgtgctggagaacttttttttttttttttttttttttactaatgttgttgtttgttttcagtataagatttacagatattgacctcagggctttgtgtgtaataggcaagcaccctactccttggttatatccctagctctgttaattatttttcttttattttgacacagggtctcactaagttaccaaggtctctaatttactatgtattcctggcaaaccttgaacttgtaatccccctgcctcagacttttaagtagctatgagtatcagcctgtactaccagggtcaaaccaaagctggaatttacatctcttagcccagattttaagcctttcctctttttttcctttgaaagatttttaataaaagacaatctatggttgaatgaatgtaccatcacttttacatggtctgggcatactatctagtatgacttcattgaggtgcccaaccatatccgaatctatttcttcatcaacatttttcaatggatgaattaatatccttctgttcttttgtcatgatcactcatctcttaaggaagcaaatctggtgcaaaagtgaaaggctgggggtttctatgggtgaaggtcaccattgcatgttagcaaccaaatgctttcagcaacaaggcctcttgggactccctggggaagaagactcaggatagtacttgggacacgctgggaggaggagtgcaaagtccgtatataggtcaagatttgggttttgattcttcgctatcattgttattttcttctatagatccatgctcgagagaggagccatcactccttgtacattttcctaggacagcgaagttttgattaagcattcatacatttgcttatttgattatttataattctttttgacaggttgcccaggcttaatccaaattcatgatcctcctgccccagcctccctagaaccgagacagctggcttctccctctgggtcctcccttttaagtttcaagacactcagatttatcaaggagtttctttgttattttttggttgtgtgttttgagtctcagactggagattaggtttgaaaagcttttatggaccatgtgcccaagatgacatgcctccccaatgatccacatggcatgagcggctccagatgtcagtggcattatcaaactgaaagactcgtcataggaagaagccagagacttgcctcatgggctgataagaacttgtgctgttgatagcagagcatcatattgtccagttatgacagagcttttgtgaacagcatgtggggtcatctggcttgaccctagagccttggtgtgtagacagaggaaactgctgggagtaagttcctgggtagggaacagtgcagttctccttgtatttaatctgcatggaggatgttgctttatttcagtgttagagtgcttgtctatgcaaagtcttaggtttgatcactggtatctccagaataaaaagcatttaatgtatatagttatgtggagggggtgttattgcctaattttacagccatggcaatgaattactagttgtatctatctacttttattttgtagctctgtaagttatttgatatatcagtttatgataaatattatctcatggtttatattttaacaagttttgaactttattaaacatgcagatcaatatatatcatgaataaataatgccctcaccagggtttggcattctggttcttctgtctacatgaaataaattgtaacattttattttcgtctgttctctgaaagaaaccattaagaccagtatcattctctccaaaaacattgagagatctcatcaatagaagccaattcagtcaaaacctggtttttatgagtttgcttccaattggaatttaaaattttaaaagaaaaagccctgctgtttatgtcttcacttcttattgtatcagtttgagaaagttgtacttttacaggattttacaggagcataatcctttcatctggctgtcaaaacttgtatatatatatatatatatatatatatatatatatatatatatataatgttcttcatatttttgtattattccctgagttcccataggacttacatttctgtccatcatttctgacttccttgtgttacaaagttagcttcctgtcatttttatgtcattttaaacacattgaagattttttaagccaagagagcaaggccatttcttccatcttcaaggtatttgttatgctcctccctctcttccaatccctggtccctgcctatttatgtatgtatgtatgtatgtatgtatgtatgtatgtatgtatgtatgtattttggacagactcttattgtgtatctttcgctggcctggaaatttctatgaagaccaagatgggccttgaactgacatagatctgcccctgcctctgccctgccctagccccgcctctgcccctcccctcccccctcttcccccccccccttctggccctggccccgcccctgcatgctgggactataggcatccttggctttgccatctctattcaactgcctctctgttacttaatcatgatccagaaatagtgttaagcatcttctagcaggcacagcacaacatgttccacatgcacacacatttatgtagcatgcacatatgtacatactcagaaccgcaaaaggaagactttaagcaaatcattaagtaaaccacagtgtaggaagcctttctgttctcttctctcctgtaatttgatctctcctggacttctgtgtttctttatagattgcacaatcgctcaatatccaacataataccctgtgtgtcacaaatgctttacactcagtggttaggtaaagagctaacctaggatgaaaattctatgtggttattttaactctcccagaggtctggaaacagtgatggggaccaattgtggtaagctacagattctaagtatccccctgtttgaatcttagtgcttttccctccgtggctgctgtgtttctgtgtacactttggtctggagatatagatgcagtctccttgggttgctatggcaccatggactagctggctcaaagagcacagacttatttccccacatttctaggggctggagtctgaaatcagggcaacaggggaagggcttctcacagagtgctggaatggcagaagggaggaaggaataccctcaccggtgtctcatcttaaaagggtgctaattacatcctggacgtgcagccttcgtggattcaggcaaacccaactctctccttaaagccagaacctgtagatgctgcctagttgaatttagagcttgagcatgtagtttaagggagagagactgaaaccaagactaggttaataagagagccggtgctgaggacggggggtgttggggaatgggttaggtgcactgatggggcgactctgctcactgtcctctggcaagcagagtgccttcgaagaggattttcataattgagttatgttggtaagaggaaggtgtggcagaagagttagagtcttcctgtttttctctctgtgtagcacatgttataaagaagtcctccctatgagccctccgccagtgtcaagtaaggtcactcacataaaagaagtgacttggtgagccctaagtggcagcccctctcacaccctgttctgaagcaactgatttgagggattatagccttttccttttcccatcccctaagccatgtccaaaggagcttacatggtaattcccaggatgaagctgatggatagataagcttgtaggacataacgtgtgggagcattctcccaccctctctagccttcccgatatggctggcgcatctgagtccacttgcaaacgggttggtggtaggagaagtcatagatgctattgaaacacactgtgtggggcaaaagaacttgtccataggacaggtcagaggggcataaactccttccatatctttcaagaacatcagcttgagcgtgaacagatctaaagggcatctacagctcaggcctcctctctacctctgccatgatccccagtaaaattctggtataccatcacccacccagcagcagcaccacagaggtgcacactcctagcaggcgtcgcaggaagtctctgggggatttgttccacaaaggctacagagtgaggtctgggccagcggctcctgagaaagaagaaccagagaacttctggcagtcactggtggcttgcagcagggtttgtgcttcatggggtaaggttcttcctagctatagtcattctttccaagtgtaccatattcccagaggcattgcccttccacggcacagcatttaaggaagtgttgtggtgtgtaatgtgtgtatttgtgtatatgtatgtgtatgtgtctgtgtctgtgtgtaatgcatgtgaatggtatgtatatgtgtatacacatacacatacacctgtgtgtgtgtgtgtgtgtgtgtgcatgttcatgtgggatgtatgtgtgtctctctgtgtgtctctgtgtgtgtgtgttcatgttcatgtgggatgtttgtgtgtacctatgtgtctctgtatgtgtgtgtgtatgtgcatgttcatgtgggatgtatgtgtgtgtttctgtgtgtgtgtgtatgttcatgtgggatgtttgtgtgtatctatgtgtctctgtatgtgtgtgtgtatatgcatgttcatgtgggatgtatgtgtgtatctgtgtgtctctgtatgtgtgtgtatgtgtgtctgtgttggcggatagtgccacctccttttcctgttttgttggcataccaaaatgtgccaggcgagactgaaatctctgccttccttcttagatggatttaaccagcctcgacctctcctgaatgttattgtgcttataaagagagcccacgggaaaatttggcaggtgactggtgctaccttcttttactaagcagcagtaatttttaatgtaaatttcagtgtttcctgaagaggcatagatgatgctttcccagacaagcagtaggtgctgtagttccctctgtcctttagtgggactctggcagtgcaggcctgcctgccttgtgtgatgttcattatctgtacatggtaggagccaaacctttcagcagatttttctttctcaactaccttccaataatagggatttggttttgtctgtccatctataatgcataacagtttcaaataaatggcttaaatttacattttcagacaaaaaaaatcccagttttagctctatttccagaacatcagcagtgccaggcgcttctttaaaatgaaatattgtccccttggaacccagcttagaattctgatgtggataggcacagctcaaataaccctgcgtaatctaattagacctagcaaaattccaattagcaagcaagtgatgggtgagtctagtcaaactttttcattagcaatgacaaaaaaggacgtctttcaggtgaactgtctagagtcaagatattcatgtgactgtgtccattggcttgctgtattccctctcccgttattgcaaagagttgctatgggcttctgcagaagcagcattggtgagaaccagtgtgaatgtcactagcaagagggctttgagcaatgggatgttcaagaggaaagaaactagcacaagtatattggcaaatgaatgagccactgaatgggtcaatgggaaggtgtcattctcattgtgaccgtgacctgatatttagtatctgtcagacaggagtcagggctgaaaaaatgtaaagaacaaagcagcctagactatctccctgggaaaagattgctaagcatgttgcacacacaggcaaggagtgtttgtataacacattttctagctggaggaatgaaggtctaggagtgtttgggagtgagaaacacagatcctacacctccacctaggaaggaaagccaagagtttaactataggttgggatgaaaagtcaggtggccccagcagcacccaggctgaggatacacggtggagctgtaatggttaagctatgggagactaccatggaagagcccccctgtgcagggaacagctcgtttctctctggtgctcacagttttgatttgccttcctctggtctgcaaggccagatgacagtgaccttgtcagataccacaaaaataattgctctctgggatttgcatggtgctgtaggaattggaaactacagaggcttcttagaaccttccagccttggatttaacgattaaggagtggaagggaaaggggaatagtaaattgcaaagcctggacaggctctctgcttcaggccagatgtgtttgctcatgtgatttctgcctcgtgttctctcaggacctcagacctacagaatttctgggataccagggatctgaacaaggaatgactaatcaattacccatttatctgtttatctcttctcattcctcatctaagaaagggcacttaaatctcttgatctgaactcagttactcctgagattttatagccccagttcttaggagactctaacctggggtcatgcctgggccaccaaatttaaccctttgagaggaaaaccttgactgaggggcctccttgcctggagtcagtggctccacctgactaaatcttagtacaggactaagagccaagaaaactggacctatagtcctgatttgctactgacttcacaatgccaccacagagtaattatgaactaaaatcttaacatcaatgttatttaaaatattttaaaaatggaaaatacctcaaatcttatataggaaaaaaaatcttataaaggtaataagttcattaaatataaatatatataaattttatatatttataaggtatagttttactgggaaatgcgtactttatgttttgtctttttgaaaaaaaagttttcaagttgctacctaaaaaaaaaaaaacttcaaaaaataattgattaagaggctagagacctacaacctttccaccctttcctatgattgtccccatatcttgagtgtaggacttgtattgtatccattgggcacaggaaccccatgattggtggtctctgtagcttgaccccaagtggttttctgtagtgattctgtctgatgcaaagagagctttttgataagggctaagagctacacttacctgtggctataaggactggtattagagttcaggtaggaattaaacaattcctgtttttgtccttcctagctcttgatacctgccattctaatttctatgtcctcctgtgacttaacactacaagtgtgttccttgttacatgtttgtgcatgcgcattatctgtaaagaagatgtgctgtatatacttaaggagacctactgtagtgctaagctgctttctcttttccttaatgaataattttgcaatgaacatctttgctcctacagaattttttgtaacatcttgggctttattaccggaaatgagattagtttgattcataatgttgaattacttctaaaaaggttttctatcaatttgtaattccatcctcaaattataagacttgttgcagtcgtctcccaaaacaaaactcagagatgcagctagtggtatgcaacgaatatggtatttactgcattttgtgtgatatcaccttttttcttcaacctctcaaaagcatcttcacagcacatgtattgattatcgtcagcacattgtacggtatgtctcgaactgatccctctttcccaactggaattttatagccaagagctgtgtcgtaccagctgtgtctctctgagctgctcctgccccctgggaacccactgtctggtctccagttcagtgagattgactttttcaggttcagtgaaagagtgagtgagaccagacaatatttacttctcctcatctgcttgtctcatgtaacatgtcctctccgctcatccaaacaggcttttcttctcctatccctacactgtatcccattgtgcatatgtttcgtgttaaattccatccattcacgctggaacatgggtgggtcttatcttggctctctatctaagtctttggtctgttttgatttgagttttgcatgggatacaatttcttccacttcaaccaaacataattgattcaaatgactctttcctagttatattttctgttccatgattttctgttttgatattttgagcatagagcactttttacagtcaaagaaattattttttaaaaaataacctgtttgatagatctcacaggtccaggttagttgagactgctggcctttctatggggttgccctctgcctcagcttcttccagcttttccctaaatcaaccacagggtccctggcttctgtccattggttgggtgtaattatctgcatcttttagctgcttgttgggcctcttggatggcagctatgctaggctcctgtctgtaagcataccatagcatcagtaataatctcaggctttggagcttctctttgagatgaattccaacttggacctgtcactggacctcctttccctcaggctcttctccatttttgtccctgcagttcttttagacaggaacaattctaggtcagagtttttgactgtgggatagcaatctcatccctccacttgatcctctgtttttctactggaagtggcccccgagatctctcagacactgagccaccacccaggcagcatacaccagctgatatgaggcccctaacacatttacagcagaggactgcctggtctggcctcagtgagagaaaatgtacctaatcctaaccctagagagacctgaggccccagggagtgaggaggtctggtggggtgggggtgaaaggggtgggggacatcctcttggagacagggatttggggggagtttgcagtgaggatcagtcagagggcatactgggagggggataacaactgtaatataaaaatagattacaaaataataaaattacaaaaatttaactgtttgaaatactaaagattttgtcaagaaccttgcagatgctacgtatgagttctaccactgaactgtattcctaatttggaagtgatcttcgttgcgccgcttttattgttgtatcatttttagctgggaatctttgttttaaaacttgcagaaatttgatcttacttcatagtcgtgaacttcatatttcagaagttgtctgcttctttttgcctctcattttagatagatggcctagtaagtgtgcaagcttcattatttttctgtgttagaatttacattggattttaactcatcttgaatcatttttaattatgatgaaacgtgactgaagttcttcccagctgttgaccaaatatcctagaaattaatcttacactcaacttgtgattagttctttatcgaatgttaacttctatgtaaagaatatttttatataagaatatttctctgctttttacctttctgtcccctttctccctctttcccttcctctctttgtctccctctttccttccctcccctctccttcccttcctttctacttgtctccctccatcacttccttccttccttccttccttccttccttccttccttcttttttttttttgtttgtttgttttaagtccaggaatcactgtgtagcccaggctggcctggaactctctctatagaccaggctggcttcttgctcacagagacttcctgtctctgactctcaagtgctgggcttaaaggcacttgccacaattctcagatatgcttatttatttttcttattcttttgttattttttattatttgtgataaatctaacttagatggctactgtaatttcaacctaataagatttctttgtgaccaaataatgtggtcagttttggtaattgttcaatggttattaaagagtagtttactgagtaatgagtgtgaatgtgtgtgtatacatatatcccaggatgtcctcccttgacggaagcaagacaccaatgttgttatctctgtctctgttctcttggtttctcatttccttatttcattttcactttgttgtaggggtttttaactttagattactgttatttattatttatttttttaaaaactcatttcacatacagacaatcagttgcttttatgttttctcttactgcatcctatatcctatttctgcaggaattatttttcttctagtcaattctgtctacattacttggcagaagcaatttcttttgagacccgtgaggggttctgtcccttgctttcttgcatctattgcaaaaagtgtagttttacattttttttaaaagtgaattaaatgggtataagatcttcgagtaggaagagatcactatatttttcaattcgtttctcagttattcacctataatggtttcctttgttagtctggagttccagagtttctgatgtttagagccattcccactagcataagttttggtttcataggtacgtaatctagtcttgattttgttcttgttttctttgctatgacttgcctatccaatcactttttttatatttaaccataaacatgaattaataagtgctcttcatgctgctgaccatcccccccccactgaatctctgccaaatgctgaatgctctgtgctgtacgtaataacacattacaacgctgatttctttttaagtggcagctaaatagcatgttcctcaaaaattgagttcatatatacaggtagtgtgctgagtggggaaaatgttggctttattggcttttaagtgactcagccattactccgatgtaggggagttggaggggcatgtccaaataaagcatgcttctttaggcagcataaatgaatgtgtcaatatggattgacaaattgaaggtttaaaacgaaaagatactctaaaccagaggttcccaaacacggttgcatcttagaatctgaactttcaaatgtcctatgcccaaactgtacccctgactattcatttagaatatcctgagctgggtggcaaactctgtactggctttcgtcttcagcctgcagatgcagcaggatggtgcaggaactgccaatccatgggctggtacctcagtgcgatctcctgaccaacagcccagcctcagccgagagcttgttcccagcacagaacatcaggcccctcacagacccaagcagctgtagccaactaatccccgtggtctatttatatgaacggaatttcccagcaatgaaactatacatgctttacatctcattcacagcagaattgagtccttgtacagaaactaacatgttcattgatctctgacctctgtagccatctacatactcacactgcatcacacacacacacacacacacagagagagagagagagagagagagagagagagagagagagagagatctgaataggctttttctaccaaccccacccccagccccatgatgttcaactggctcattacaggcctaaagccaggtggccagacctcagaaacggagacaaaatatgagttttctttatagcattgatggtttctatgatgttttgccacaacagtagaaaaaatggcacagcttctgtcagcccagtttggacctggaatggtctgatggtgatctggttcagagaagtgaccacaagtttggggtctgggtactctccactccagaaacacttctttgagaagccaagtgttcccccctcttttccatagacacttggtttttcacagtcttctgggtagttcccattaggaagacactcagggctaactaagcaggcttccctaacaagattataggttgtccttgtttgctttctgttgttgtcataaacactgtgatcaaaagccatttataaaggaaagtttctacattttatagtccattatccagggaagccaaggcaggaactcaaaggagctttaagcagtaaccatggaggaatgctgcttactggcttactcctcgctggtttgcccagcttgctttcttatatagcccaaacatacctgcctagggatggtacggcccatattggattggtcctttctacatcaattaacaattagcagaatgcctcacaaaatgcccacagtccagtctgatctgggcatttcttcagctgatctctctcttctcagatgactctaggtttgtgtcaagctgacagttaaagctaatcatgacctagatagactctatgccccctccattccttatattcctagcttcttggaagtcattaattagtatgtggcaatctgcaaacaccagtatttaagaagaagaagtttaggacagtggtactctatcattggtttgaagatatatatatatatatatatatatatatatatatgtgtgtgtgtgtgtgtgtgtgtgtgtgtgtgtgtgtgtgtgtgtgtgtgtatgtatccaactgtgcacacaagcacacaaagaggagcatgtgtagctaaagcaggaacagctgccatgttgctagtgggtctatcccatatgactacttcaagttcagtacctctcactttatgacatggtgttgtaagatcactgggtggcctgaaatgtgaaactgtattctccaaccttctatgtatgatctgatttaatgtcttgattgattgattgattgactgactgactgaatggttcgagcaacttgagaaatcaaagatgggctattcaaaaatgttttagttgctgattttagtcttgtagagttacttgagtagttgtcaaaaaatgtttgttaaaaaattcagagttttgctcaagtgttatcagtgtgttagcttttcatctgagataaacaaccaagacgtaggaaagttggatttggggttgcaatttcggaggcttcagtcatggtcactggctgttccttcggactcagtgccactgtggagagtgtttgctagaatggagctcttcatctggaggaggctgggaagtgaggaagagaagaggaggctggggttccaacatcttttttcagaacattccctgtaaagcacatttcccgctgatgccacagccagagactgagcctttcagatgtgagcttcaggggaactcgtaatacttaaatgagagcatctaacacttcctgtttaatatcctcccctagtctgatgcttatattcagtgtttaacttagtattatacttggaacgtggaaaaaaaaacccaaacaaacagacagatatattttgctcttttaatttcataccatttttcttttcatttctagagagttcttttctactgtgttctggctgttgcttttgaccccggagttgtctgtacttccttttactcctcctgtgatctccacgccattacctgcatttacctgcattgtgtctgccccccccaccccccccacctcaggccctgattctttgttgttgctgtagaaacaatttaatcccaatatagaatttctacccctacctttgatcattcagttcctggataaaagatacaaatcatctttatatttataataagcctttatcagcattaatgttgggtatatatctatcccctatgctattaatctatttcccatcaataacctcaagttattatttactatgcttcatttgggctgctcttaactccaattggccatccctcggggccatagtgtcctgactcctaaccatttttctcctctttccaccttcttctctcctgccttgtggtctaccataactccaagactgagaatactaagccttgcctaattctgcccagctataggctttattcggcaatcagaaataacttggggcaagatcacatagcctctcttgggtctacaagcagaaaaggactctgccatctttggggcaaccaggtcttgggggccgcacacagcattacagtacatagcaccagatcaaacctcaacattgttttcactgttttgaggcaatgtctgttcagatttggattctggccgtgttggacagccttccagcagtctgataaggttgtgttctcagcttccaaacctctttcctttcacctaccttgattctcatgcctgcctgttgcagttaacaatatatatatatatattctttagcaaagtaggaatatgccttctgaaaatcaccttttcttcacaaggatggattcttttctgatgagcaatgctgcctttgagccaatatcactctctccctctttctttgtaagtccagcacttccatctctgaactgtagcttagttttgacttgttagcaagacaattctacactgggccagttttgttcaaggcacccagcacccaggcttcattgtggaggagcagtgtgagctcgccagtgacactcgtggcttgcttcatctcaccgcgcacattaaacttccttcacggtctccttaaggcgaacagactaacttctcaccccgtgcacatagctgccagctcagtccactatgctgggccacgcctagcccttgaggtgcttttgaacgcccaggagaggaaatgccctgggaatgggctccccaagcctgcggatgtcatttggcgagcagggctccagggcagtggtgaagatcttaagatccacggcctattgggatcatttttgtcacatgacttagacagaaagagagtgacccttaaagaaagaaaaggagtgacaaaggaagaagctggctgtggcagagcatctctgccacttggggggtggaggatggagaactaggagtttactatagactgatttttgtttatttatgtgttttgtttgtttgtagtctgcctggctacctgacaccctgtttctgagaaacaaaacaaagcatctaaaacgattcattgattgctgtctctctccactcagaagctgtaactcttccatgcaagagaggctgtggatgaaaaacataattggcattagtgaaaatgcaactattaaaatgttgaatcccaaagttgtgaagtgtgatatcttattgacctgtgcttttttttttcctttctcttttatcttgcttttaactgggagaaaatttaaaatattgtagaacacaggtaactctctgggctatagtctttattttatcagggctgaaaataaagattaaaaaaaaaaatctcaaagtcataaggtgatccgatttattcttaatctgctcttaagcacaagggttaccctgagtgatccaagttcccagtataattcagagacctaaattctgccacactactgggtagctcaggaaaagggctttacatcagaggagacgatccttccctaatgagggctccctcctccagcttgtccccttatgtggtttcaaacagctcatatttaactggaaagcccattcactatctaagattaaacaagtgaagaatccaaatgaagaggcaggtccaaggtactggagcacttatcttctgcaaggcctacacactgtctgagcagacacgagtggcctaactcaggcagccactggctgtgagcaggacacccaaaccttagaagtaacatgtctgtttcatttttctttccaggcttgagatttttaagagctctcagactgatacagttttcagagattttgcagtttctgaatatccttaaaacaaggtaagctactcattcttgtctggttcctttggatggggttgtaaataccaagtgtatgtttccattgtgctaaaacgatagagttacattactcacaggaagagctggagagctcacctaccaaggtaaggcttgcagcgttctcctctgcagggtcagggagaaataggagagaggcagagacatggttatacatgtggggaagaggagacagtccaacaaggtcacatagatggcatcgaggcaccaaagcagtctgcaacataggcatcctgggagaggcccatccatggtggatgagggatggactcgctcactgactgggaagtccttgttgccaggtcctcaacaccccttcagttaccactaaataagaaattgaacttggctataaaggcaagaggagcaacaatgttctttgacaggcattcacaaagctcatatggcaaacagaaaatcatctcattcccaagtccaatgagctgtctcactttatagccatagagctctgaggtgtgctctgtaaatttgccttgtgggggaaaccctaaaagcctcctgtcaaatgcaccacgactgcttctgttaactgcattatgatctggaaaacatagctaggacagggccagaaattccctagggggtcccctacctgatgacctgttggcgcccacagctggcctgaaacctggcctgtgctggtgagcacactaataaaagggtcaggagtgctctaatggggagcgactgcagctcataaacttctctactaggaaattacattttaagaagaccccttctaatgttccatttcctcttccgttggccttaatgtgtctgatgagtgacagaaagcaggacacctctgtgtcgtgccgggtataattaatgtacctgctgctcgagggcttggattctgttggtttcctacgcgtgaaaacctagcttcttgcatccagtatatctggcaagtgtgcttttattttgttattgatccttattttaattctatattatcctcctttccaaggattcatttgtatcaataagagataaaattcactttctattgacagtgcaaaatgtacaaagagccacgaagctctcttaagttatgccttatccctttatattttatcttcagaggtaaaaatttattgttcctctatttttgatttataatattattcataataattttttaaatgtacagtaattcttagatgttctttgagtagtagccttaagttttaccctttaatagatctgtgcagtaggattatattacttttgaaatagaagtgattaacaaagctagtgtatctaactaggtcctttaaccccagaactagagagggagaggcatacagatccctgtgagtttgaggctacctgtctctacataataatttcctgactagtcaggcccacagagggagaccttgtatcaaacaaacaacaagaaaagcatatctagtatgaacgtctaccgagcttgcattacaaggctgatcaggcccccccatccccactctcagggagagttggtgggtatatagtaccaaacttggggcctgtcctatagatttctgttctagcagggattaggatagaggtgctataatggaaccatacacatgctctcacataccctcaggtctctttcttctgtttgtcattgacctcataaatcaatgagacttgttctatgacactgggactctaggaagatcctagccatactgcaggaagaatagtgttcgggccctccgcttcccatgcagatcccctctgagtgaccacgatatgccatctgagtatcttttaccagccttgtgttaggacactcacctatttcctgcccctcagcaaagatggcctttcttttagatttagaagttgggtatggctctcttggagaacaggttcttcatagctatgtacgtatgatgctgcttaattgtttaagcaaaggaggacgacagtagaaatttctggctggaggaagagggattgtgcttctgggggcagcagctctcttgcacagtagcagcaattgagtaactccaatcctagcccccaaacagcattttctcaggactgtcactttccacacagaaacttctactctcagacaatgtctttcctcagactgtgcatgtccctggttcctattattttcagttagaaccaggtgaccatgtgaaccctgtgaatctaaggtgagcatctatgaatgcacaagtgaatatggagggtgagcgtcccaacaaatattgtagctagaaagctggaggtctcatgggatgggaaatcaaaaccagacctcctgccagagtacaggtgttagaacaggagtgagcccaggtctgagattcagagttgttgtgctgaacctggcaggagctgtgcagcagggaaggtctttccctaggagaagaaagaacccttgagaaaaatcaagtgtctgacattcagtgggactgtaggatggtcacatgaagggtagggaagatgctctgagttctgtcaaaatatttgtagaaagcacacagtgagagagaatgtgacacctgtgggacctttgagccattccgtgctcctgaacatgtggttgacataagaagagtgagtttagggtagggaggtaggaaccaaatctctaggtaagaaacacttccttcagctgcaggaactctagcagtgtggggacactttctccttggggtaccaggctacaccctgcttcttcttcagacactccaagatagattgtttctcagctctctggaagaaatgaagccgcaggtttctagggtttagccttgggcagattctcttgtgagccctgtacacttggatgctttcatggtgactttgtgaggtggggaactgtgtcattgttgttaggaaaatcctgcctggctttctcttgtaataatcccctgccagtctgaggagggagactctacaaatatgataaaaaataatggtttgaaaaccacggttttattttgtattcttccattgcttagttcatcttagaactgaaagaaatggaacacagcagtcagtgtgttggtgggtggggggaggtaattaagaggacaacagaaggaaccagagtgacagagtgagcaggaggacaggcacgggattgtgtagccagaatcagggcaagtccccgacttgtaggttagcagggggctgagattctccgtctcctgacttggcctatttaaggaagaccagagattctgggtcatctatgtgagcttctggaagtccctcagccatcctacaagctggtgagtcaacttccagtgctgggtcatttgttccacaatgaaatccagatgaaatctgcttatgggctttaatcccacatctcattcaacatagtcaataatgtttattaaaccatggattgcccgtacattcgttttctaagatgaaaatggcctcatggtttcctctaattgtttaagtaacacgtgcttcctgcgaacatttgtaccatatgtaagagtgtggtgtgtaaagggtaaagtaagacaccgtgcctgccctgtgctgtgctgtgctcagaaagccattgctctctactgtgaaaatgttctttcctatgtagcctatgtgcacagctgctaaccagttacccaaacaacacatgcagggaacatttttgaaattacctttattacatatatagccttagaaatggccccaaggctgtttgtgaagcaggatatttgctccagagattacagggggtacaaggtagaagcctgactgtgatggctgcaagatggagatgttgaaggcttttaattgggggaggaaatatagacatagcattctgaaagtccatgtttcctctagttgtatagaattggtttgaggtatctaagatttaataggtcttaaggccagaaaagaacagtagtagcgaagggcttttgaggccaagcctcagagcaggtcaggtggacaaggaagagaccaatacagagataactaaagaacagactatagagataacttaggggcaggcatgacacaacttgattttgattcattttgtatcacaaagttcattaatctcagtgtgacctggtccgtactcacgaccggccaggaagaacacaacaaaccagaatcttctgcggcaaaactttattgcttacatcttcaggagccaggagcacaagccccaagccccaaaaacgaaagccccccgcttacatctttaggagccagagcgccagagcgtcagagcgccagagcgcagagcaagagagagaatggcggaaaccccatccccttttaaggagaattattctttgcctaggacgcatcactccctgattggctgcagcccatggccgagttgacgtcacgggaaaggcagagtacatgcagtggtaaaatacccttggcacatgcgcagattatttgtttaccacttagaacacaggatgtcagcgccatcttgtgacggcgaatgtgggggcggctcccaacatctccccctttccttttaataagagcaataggccacccatattaatgagagtggagatagaggtcaaatccccagtgtgcaggtaaaggagccatgtacaggattagctcttaggctcacaggcttttacccagagcaaccctgaccggctcccgtgtcattttgtctggagagaaggacacttggacactcaaccttcttgaaagatgacatgtctccctagaataggctcatatatgccgcagagcccttctactgcagtgcttagccgtgcaactctctcgggctgctgaagcacactcactctatcccgtgcaatgagtctagcctcgtggtgtataagagctgagtggccagcaacctattgcttaagcatagatatatcaggggaagcaccatgttctagagctgcaagtgcctgggcaataaccaccttgtctctcctagtttgggccttaagcttacagaccaaccaaagaagcaacactaatccacagcaaagtgtatctccaaataatatcaatcccacccattctttaaagaaggaaaatgctgaggagatccaattgggtaatcctttggtcagggacaggtccaagcgcgtggagttgacctgaagtctcaattcccgaaggatctgttcaaattcagccgtccaattctgtaacatatactgaaaaagactttttgacaaattagctgccctagtaaatttctcatactgaatggaagtaacacacaatcccggaaacttttgttcacatcccagctgagctatttgccataatacatctagttgtttctggacaagatctatgagttgattaaccagcatgagaccaccctgtatcttgacattagctgaggcctgtttaactatgactgtagtcactgaggctgacaaagtgttaatggtgtcagtcgtctggacctgtccagacagagccaaggctgtctgaatcaaggccaaacccagttcctagttagtggtaaaaaagcaggggaatacttgagcattatacatcaccgtcattaggagtggaaatgtcgacattatcccccaacgctgctctctctttattattgacgccctggacatcatcaagacgagggacatcagtattcccttggtcagtctggatttttcgggtgagtctttctggtatccaaaatgggttgtcttcattctgtgggaaaacacagatagctcccctggatcttatcaaaataggatccgggccataccatttattatcaaggacatttttccatttaaccatctcattgggcctatctggctctgaacaatgacgttcagccgcagtatggccatgaacatcaatatttaaaaaattgagtgtaaagagtgccatagacacagacactcttggtactcggggtagagtctcctcaattcccctcttctgttttataagataggatttgagggtgcgatgcgcacgctcaacaataccctgtccttgagggttgtatggaagtccagtcaggtgggtcacgtccatctgacggcagaactgctggaatttttgagatgtataagctggtccattatcagtcttaaggagtttgggtttcccccaagcactccatgcctcaagacaatgttgaatcacatgtgaggctttttctcctgttaaaggtgtggcaaacattacaccagagcaggtgtcaatagaaacatgtaaatattgatttctcccaaaggaggaaatatgcgtgacatccatttgccagacctgtaatggcctgatgccacgagggtttacccctacatgaggagtagataaaatttgacaacaatctaaaggcattattaagtaatcagaatcactttcagtagaaccaatccctctggcagctctaggaataccagaggaaggaaaaacagccatgtaggcttggcaaaattattagttgagctattctgtccctttgtgatatagaaaagacaacttgaggacaagaacagagaacctgaagttcccctttacaatcctgatctacaactccagggtggacaataagaccttgtaggctgcaagagcctgcctctgtcatactggccacaaaatctgagaaggactcctgaggtccctggacgatctttgttaattgtccagtggcttcacctgctcgggagagcgccttccaggccctaatagccttttcatctgattcagaactattaaaaactggctccttgaactcacctagtgatgagtataggctccttctcctagaaacctccgctgattgatcttttttcttttctttttccttctccttccttccaatctctccccaggtattcttacctgacctaaacttttcctcgggttcaagacccttggaaaggcctgtatacttattttgtgtaccatattttctctttgctcctactctctctccccgctttacttctgatagattgtcctgaatttcatctagaattttcagccctgccttaaccacttgataacatgtgaaaaggaacaaaagggctcctaacactagagaaagttcaaggccaaacataccttgtaaagctattttccactttacttctgatagactgtcttgaatttcgttagaaagttcaaggccaggcataccttgtaaagctattccccactttacttctgatagactgtcttgactttccttagaaagttcaagaccagacttaccttgtaaagctgtactcactggtactcctgttccccagctgaaaagttctgaattcacgcagttgaatccttctcaacagtctgtgatgcgggaacactttattaccgccgtttcccagctgaagagttctgaattcacgcagttgaatccttctcaacagtctgttttacgggaaccttcgttaccatgacccgcagttctggttccgtaatgagggatcttccttgcgccggtgatggttaactcccgtcccgagttttcttgtattttctcgtcccgggtttcttcttcccggcttttctcgtcccggattttctcgtcccggattttctcgtcccgggttctcgtcccggattttctcgtcccggatttcggcaccaactcttaaacgcgttctcacgaccggccaggaagaacacaacaaaccagaatcttctgcggcaaaactttattgcttacatcttcaggagccaggagcgcaagccccaagccccaaaaacgaaagccccccgcttacatctttaggagccagagcgccagagcgtcagagcgccagagcgcagagcaagagagagaatggcggaaaccccatccccttttaaggagaattattctttgcctaggacgcatcactccctgattggctgcagcccatggccgagttgacgtcacgggaaaggcagagtacatgcagtggtaaaatacccttggcacatgcgcagattatttgtttaccacttagaacacaggatgtcagcgccatcttgtgacggcgaatgtgggggcggctcccaacagattttgattcattttgtatcacaaagttcattaatctcagtgtgacctggtccagtcaatgctttaaattgggacacttcttagctacctagcaaatgttgcaaggaaaagataaaaatggctgttggctcctggctgtgccctcaaccagaagcaaggtagcagtcagcaagagggcagaatttgtgctttcttgtgcaaagtggctggcattttcaaggttcaccaggacatgttctattttctgtaagggcagagatgaacccttggcagctttggctttactgatataattttcgaaatcagactctctcccagcacctaggggtcctgggaaaggtcactgatcagtcagactatcgcttgcctattgatgaatcactctgtccacccatatcaatgactggagttcagtgttagtcagactgtgccaaaattcctgagaaaacaacataagcaaggaaaattatttgagctcagagtttcagaggtttctgacccatggttggctagccttgttgctcctgcctggtggcaaagtggagtgtcctgagaaagcaaagttggtcacctcatagctacctagagagagggaaaataagtagaaaatgggagaagacatcagagacaagatgtagccaccaggaatacatggcttctaatatttctaacctacttcctccatctaagccccatttcctaaagttttcagactctcccaaaatagtatcaccaggtgaggaacaagtcctcttaacctatgagcccttgggaaacatgtcctcctgtggtggtttgaataagaatggattctagaggctcatgtatttgaatacttgtttctagtttggtagaactgtttgggagggattgagaggtggggccttgttgaaggaggtgtgttactttgaagtgtcaaaggccacaccagtcccttccccttgcctagtgataaggatggatcctcccagcttttgctctagggccatacctgcatatctgctgccatgctcccagacataatggctatggacttgccccaataaatgctttttttctatcaattgctttagtcctggtatcttatgatagcaacagaaaagtaactaagacatataccaaaccagaacagccacggagaattcatgtatgggaattcacaagtttccataaaaacacagaaatgacacttacaaaaagagggggcaggttttcatgatcggatcacaatctctccttcaaagcaaggagctagactctgcatggtcagtgccactctaactactgataatttcatgtttgattcaagcctttgggcttggccaggaaggctgcagatagccatctccaatgactctttttgccacaaatactcaatgtcttctgctggcaacccctccctcctttgaagcagtcatcttccagatgtcaaagtccacatcccagcggacagagaacacccatcattggggttaatcttgcaggttttctacatagctttcagatattaacttggtcatagggttcagcttggaagtccacttcctcgtgcgaacaatctgtgatgttgctgatgtcatacaattaatcagatttccacaacaaacctggtctgtctcagcagtggtgattaaatgttctgcactcagcaagagctcccttaagcaccattaatgtcccagtgacaatcatttagagattaataatcaccatatttaggccatttccccaaagcaccaagagacgtcagtagatttaatatcttgaaaagactctgcatggtttttgatggtgcagtgctttcgcaggccctgaggatctgggagtctgtaagtgactcaattaggtgttgaattctcccctggaaatagagagcagcacatgcctctcctctctctgccataggctacctgctctccctactacttgcttctcttcaatatcagatcacgtcttagggggctcgaaagggagagacaggggaatgggctgctctgctttgattttccattgagaaatttgcctggagcaaggtttagtggtaacatagctgatgagacagggtaagcctcaaacttctgttttttcagttggcaattccattctctgtcagagaacttcgcttgatatgaggtgaagcacagagtgactcattgagatgtctggaaaaggcttgaaggtcaggagttagcacaagcagccttgtgcttgggagtgctagcttcataccacagcatccagagccctggagctaaccgtatcaggtcacaaagtgggcggatatggccaattcgtatgttctctgagaacattctagatgtgagccatttcaattgtgtctaggcaagtggcagagtgactgggtcccagagggagtgacagacttttggcatatctgcactcaggctgtcagcttccctccttaagattctgctcctctcttcatctcttttgggtttgttctctggaggtcttctcaaggattgtatctgagatggattagaactctcttccacaaagttcctgaaaactctggcaggcttctctgttggctgatgttgatgttggctgaattccactggattatttagtaaaggaagtccttggtggacaccttggtctcccatgtcagtagctgtggggagattggtcgttaggaagtgatgatgggcaaactacagggtaagggaaaagaggatccctgaggcttcctatagtgtgttcccaagctacttagatgaggcctgccacttgtagctgtgattcccaggcaagctatctacaccccctaatgctcggtttcctcaatagtgagtgacagtggtgttctcacctaccacctgcattagcagaaagagtgaagagggggaggacgcaagcaaatacttagtacatcaaaaagccccagcagtcctcagggaccacaaatggtgggtgatcctggcgaggaccaagatgcccaggatggacagtctgctgttttgctggcatatggtttccaaccccgaggatgtcatcccacacacctcaaaaggctagtttcacccacaactttggaagtgtttactcattcttgtcctgaactgtcagaatcaatgccaggcaaaccgggaacttggattcctctcttcagttatataaatacaagcagagaaagctccattcctcatgctccacccaggaaacatgatcgcagcctttgttaggaggcctcccttacgaattccccaggctgagcaacaacagcctccatcctgcccttttagcggtatgctcaggatccaaaagctagcagccatcaatgccactgacatgacactgtggctgtgcagtaatagatctgaaagtggctgaaatggccacatttccatctccaactgtggggcctactgaactaaacttgtcagtttcccagttcccccagatgatcttgaaggatcctatgagaaattagtcagtatacatcaaacatcagcatgatggtgtgtgggtgcactgcgtacatactgtgaaagtctcagatgtcaccattgttaaccttctaagccattagaaagtagataatatattacccaagagaaagaaataggcagaaagagggcagtgttaccatagatggattacccaaagagaaggattagcttctgcgggggttgtgtcttagggtttctgttgctgtgaagagatattctgacggcagtaacccttatagaggaaaacatttaattggggctgccttaaagttcagacgttcagtccattatcatcatggtgggaagcatggcagcctgcgggcagatgtggtgctggtgaatgggctgagagttgtacgtcttgatccacaggcagtagaagtgactgtgtaccacactgggcatagctggagcatatgagatctcaaagctcacccctacagcggcacactttctccaacaaaaccacacccacttcaacaaggccacacctcctaatagtgcttcctctgggccaagcattcaaacacatgaatgtatgggggccatacctattcaaagcaccacaggctgcatagggccgggaatgggagaacaggaggtgggagacagagttcttttctgcaagatgaacgtgatggaaacaccattaaatataacttcaggacaactggcatttaaattgggattgtatgctagatcgcattgctgaattcagttcgttttctgatatacagatgtgtccagattctactgcatggtgtctgctcttcggagcagaatgccgcggtgattagaggttgggcggtgatgtccacaacacaatggctcaaacaaaacaaatacaaccagaaagaattatcacactgaagaaaataagacatacttgcagagatgatgaagtcatggggaaatgtcaatttaggtgaaggatacacaaattttatttactcttctctctggtttctttttaatatatatttgaagggttttgttttagacaagttaagttttagcaacgtttgaggggttaatgtagggtctggctgtgattttcctacagactctgttgagagcctcattcctgaccaatgtttctcccctgagtcaaatttccttatgatgacagcagcctgcttctgccccagaagggagactgtgacaccatcgggcagttccatacgggtcttctctctgtaactttgggactcttcttgtctcctttgtacagtaactccatcaagctggtgaatctgctctccatatttatcagcacgtggctgactgcagctggattcatccacttggtaagtagctggcatggagcaggcccttgctaggccgttttattacttaacatttgttttcttggaaagagacaagtttagctgtacatacaggaaagtgggacaagctactcaattttcagaattccctacccttaacttccacccctcaaactggttccaaatagtgagtaatgttcctaggaccaaccgacatctttcagcttcacctgtattgcttcagggagacttgcctagtttttcactctgtatgcaataacctcagaaggccacaagatggcagtgcttccacagcaaacgcccaggaaaagtctggcacctatactgaaagtttgaacttcaacagctctttgtaaacaacaaatgcaaatcctgggatctgtccctacttctctcgcacaaaaaagctgcttttgactgtcttgctagatgacttctcaagtcgtttcaaaacccccaaatggttttgtttttgtttttttgtttttaaaaactaatgactctttgaatgctattaccaagtcaaacctttcctacctccccaaggcagagttctctagcctgctttcagagagaatagttactatgaaatgtacatttcatctgcacataaactgttacaatcagaagaagcccccaccagactataaaacttagcataagtgactttgtttccatctgctaaacaagataattgtggattttgcaagagtcctatacatattttaattatgtgtatgcctgtgttttactgtagggatatgtgcacatgtgtggatgtacccctggagggaagcagagggctttaggctctctagaagtgaatgctggaaattgaattccagtccttctgcaagaacaatggttcctaaccattgagccacgtctccagtccctgtgtaactagtcaaccttcaccttttatcattcagttccttctgaagccaattgccagttctgggctcaggttccccaaatcctgctgtagcccccactctttgctccctgctgggcttcagccaagctcacagaactgagcatctgcgcagacctcaggaactctgcagcacaagcagaaactattggctcaagggccattttgaagacgtctgcagccatttctctgatggtgtgtgtgtgtgtgtgtgtgtgtgtgtgtgtgtgtgtgcatgtgtctgcagtttccaagaggtcacttctcttgtttcggaggaaatttccaaacctcggagctcagaattgctggtgggctctggtgaagaaagacaagcagtcccagaagcagagatgatgctttggattcaggctgtagatgtgtcccaaagatgttgggtctggtgttcttagttacacgaatgaaaggaaagtctagagtctcagcaggaatccccaagggactggcagaaggaagcatctagcacctgccttaaagagatgctgtaaagtgtatcaagcatcagcgatgcgtaggaaagcacaccagcgctgctcctcctcatccctgtcctgataccccctggggtttctggtgaatcatgccttagtgactagcaatgagaatcatctattctgtactgcgaatatgaagcgtatgtaaaaaacaactttcaggagctctgggcatcctggtttgcatatactgtacatatgaacatctgatggctttcttttctctccctcccccctcccttgctgtaggtggagaattcaggggacccatgggaaaatttccaaaacaaccaggcacttacgtactgggaatgtgtctacttactcatggtcacaatgtctacagtgggttatggggacgtttatgcaaaaaccacacttggacgcctcttcatggtcttcttcatcctcgggggactggtaaaaaaaagccctctttcttattgtatctattttaatgattattaatattttccaatgcccacttccttagacatagtatttttaatgtgttttgcactggaagcaagtaactgccttaatgcaaccaggagagctaaatccaaataccatagtgtctttgttgcatatttctttagtgttatgcttatcccttagaaccagacatattgtcctcactggggacagccatgtcactaggagcaaacctaatcgttttaagggaggcatgccattaataaatgagagtgtcctttagtaatggaattcactatcagatattgtagctgctgttgattctggtagatgctgtccagactctgtagatagatggcggtttcaagagctcccctccccttaatgttcctccccaaacttccaacaaacactgtggctggcacctgcccctaaagagcagggtcccttcacttaggaaatgtcattatagtcaggacataactgtgtctaaagcccgctccatttctctccttggaacaagtttcactggttcctatgtagcaagaaatcactgcattcaatgtaattccagggaacagttgcttcattttctctttcaaagtagcttatagcgaagtctgattttttttttttctgtgtatgaggtaagtgactgagattctagtccacacacagctgtggcgcatgtgcactgcacacacatttatatgaagtgatgcatacatttctctctgttttgtatgcataggacatatacattttgaaaaatgtatataaatgtgtgtgtgggtggacattagcagcatccctgcagggtcccgtagttcaggagaccccattatccagccacagaacagactttgttgggtaaaacatggcagctccgtgtctccttgctatccatcctttcctcttgtgtgatttccaaagttgacctcttatgctttttagtcatttttaaatgaaaatgtttatttttaaatcttctttttagtgtttagtatctttagctactcataaaaaattctcctttgagtgttatgtggaaggactttttgacagaaatgtatacatgtgtgtgtaagtgtgcatgcgtgtacatgcatgtgtacctgtgtacacatatgtgtatgtatgtgcacatacgtgtgtgtccatgcatgtgtgtatccatgagtgcctgtcatgaatgtgtgtgtgtgtgtgtgtgtgtgtgtgaatacttggcatcattctacaagatgtcagctcatttacgcttgtctcctttatatttttcttgactgtggtttattgttttctactgtctaggtcaactcacgtatgtttcattctgtgtggtttcaggagctttcccctttgttctgttattgttgtataatccaacacatgaatccgcacctttgcaggtctaatccttttgtgttttcagatcttagtatcccccttctgaaaaggtcaccctttctttggcctgtctttttagtctctctctgtctcccctcttctcctcaggccatgtttgccagctacgtccctgaaatcatagagttaataggaaaccgcaagaaatacgggggctcctatagcgcggttagtggaagaaagtaagtatgccaagaggtttttgtggcctccgcggcgtaggggcctctctgcatgccatttctgtttggctcttgtttctttgtctcatgcatgtaggcaatgtttgcccgctacgtgcccgaaattgctgctctcatcctgaatcggaataaattcggcgggacttttaacaaacatggaggcagaaagtaagtcagctgcacctgaggacatgtgcttgagtgacttggaaagtccctggagcagtggcattgaatcaagcccttctcgctatccccccttcctgctttttttaatgagggagggtgtgcattctgcagaagactggtttcagagcatgggaggtgattggaccatcttgaggtcttgtgaccatttacagtgtccaagagataacagtaaatatattcaaaggtgtccatgtgcacctggaaccatatcttctgctctcataccttatcatattcaccaagctcatttcacgagctggtgatatgatcaaattctggtctctgcaactgaggtctcatgacttcctggtaggtctggcatgcacactaatgggctagaactcttttcccactgtcctttgtgtcaggcacaggccaaggcctggcccatcctccctactgaaaatgccagtggctgccaggagaccttgctgataaagggtttcattacacagtggaaatgcctcctgggcaggaagtattgcagttagggtgtcagggtgccacaggcaattagagatatggatttttgttttatttctcaaatgtgaaggttttcctcttgggaactattcaagtttctgctcaggtaactttttcagcatcagtatcatcagtaccaatatcatcagcaccagtatcagagcgtgagtccagcagggaccagaagtcttattctgatgttcatgctggaaccttggtcttctgatcctctagtagggccatctcagtggaggagctaaggcagaaggatgggatggttgcaactgtcttcaaaggtcactaagaacttgctctgaaagctcttgggggccaatccgctttgttcttaattcagggtatgatgtgcatagaataaaatggtcaagcacgctgtatacccctaggaggatgtgcactgatagacataccagggaccgacatctgcatctctattaaaatgcagaaaatgggccctttcatgccagtcccctgtcccctatcatggaactgttttattttcttacttattctaactgactgtcaaattattaccttagtttggtgtttaagaaaactagagcctggcttgtagggccttctcccatggctgcctctctgtcatgacagttggccctgctggatgaagcccagggagcctcactctgattattgagtccaacacatcctgagctcaggtgtccagtcctctgtttagaaaatgaggaggtggagaaagggctcatttccttgaactacccacaggacagcagtttcctttcatagacacaaaggacagtgggaaaagaggccagttggcaccttctcagtaaggcggcatgtctttccatctccccctgtaggcctttccccttcctattatcttaacaaccctggattaggttagaaccaagctgttctgatgtctgggccatccattggttccaaaaggccaaataagcccaaagattttcctccgtcatttatctcaagccaagaggaaaacagcttcctaattcagtgtgcctttaagatatgggcatcccgagagtcccaggccctcattatagctgtctcagcccattggtctcagccagcatctccttatccctgtcccccaatgaagtcaataaaatcaattgctttgaaatctaagttgaaagtatttcttgactctaatttccaggtgggattttttttttttttttttttttttttttttttttttttacagagtagtgtttgtggcccaatatgggtgggctgttggctgacagattttgttgatgggtggcccaaaatgaggatctaagacaagcacttgctggtctgccctggtctgatctggtcaggtttaaagtctggcatgtccacccaaagccccacctgctgaggacttcagatcatgggccctcctccagatttgttctggctctgaaatctgttatcaccacttttagattttgaaatcttctctctgtctctctgtctctctgtctctgtctctctgtctctgtctctctctctccttctctcaactctgcctctcttcttctctctccctctctccctctccccctccttctctctccctctctcctcttcctccctccctctctctctgctccactctcctttgtgaaagtgcattttgcttttaatgttctcttttggatctctaaagtccccagaccctgcgggatgtagtgtacgtcctgtcatcaacaccaggactgtgctcattactttatacattgtttcctggttcaaaagctaattaccaagtagtttaaagaagcccttggtcacttagatctttcatcagaaaatataagcttgggaaaggagtggtaataaagagccattagcaccctttgtttgatgttggttctccagtcagtagaacaagattgatgaaatgttatgtttggccaaaatttgagttttcatttggaattcagtgttgagagaatgggctgtcagaatcaataagtttcctttcgcttgggatatgggcatgtggtagtaattagcaatataaggtctttacttgagcaacgaagcatggattctggcagcaaacataatgagaaactacagttgttctattccgaacgtcaaaaagtttccagataaaattaaatgcatttgcaaaagggaaggggcttaactttgttgagagctggagttgagactcttaaaatagcaggcagtacttggagttttggtgcatgcaaaaaaaatgcatgtactgtcctcatccacacatgtatacacactccccgccaggactgaattcagcaaatacctagaaaacaacttaaacatatacatagttgagagattttttttggtatgtgcatattttactcagcagtaactacacataacaatatattaatttgtcagacaaccaaatgtaacgtatgatacaccaactgcagagacacaaaaatgtgaagtccgaagatcattcaggatggaaaaccagtgtaacagagcaatgtaaggcttgaaagacacaccagccacatgcgggtgttggagaatatggaggtcctcttggtgcttcctcgtaacttttaatcagtgtgtttagcacaacaaaaccatttcctgtggcatttccaaatcttcctccctgtccacagaagtcaaggccttcttcacccttttcattgtgtcctctatcccagcagtaggagcgggtacccatacatataccggctgctgtgtcacatatctggacaactaagaatagagaccaaagtgttatttatttatttttttccagagctgaggaccgaacccagggccttgagcttgctaggcaagcactctaccactgagctaaatctccaacccctgagaccgatgtgttaacaaagagttcagttagagaccaagaaacttatcaatggataatttggaaatattgtgggcaattagccccttgtgctgagaccctaaatcttattcagcatagtagctctcctagagcccagctggcctcccaaggcctttgactctgcctccttccttcgtgtacaatgaaaactgctcagaggtggtggaggcatgggggagacggagactcccatggccttggggttcttggtttgctgtcttttccttccacagcctcttacggtttccccagaggtttcttctctgagtgtaattcattctactcctggttagtttatgagaactgacaagatcatggtccaaggtcagatggccaagggccatggaaaataattggccacagagaggaatccatcagctgtaaccccctggatagagacagcacagctggggagccatccaggccttatgtttcccatgatgtggcttcaatggccccaaactgaggtagttctggcccaggtgtttgggacagagagaagagtgtgggtgtagagggctccacagatttttggtagccagaagctgagaggacacatggaaagaaaggaattaaaaaaaaaaaaaagacaaggagtggacaaaggagaacaggaaaccagatgtaattagcatggaaggaaaatctccatggtgacttcccaattctagagtggggagcagtttctacagccagacccatatcttgctccagagcaattgctcttgctcttgagcttcagtgttggtctcttactacaaacaccatactgttttatctagtagaccagtttcaggatttgtaggttggtccattttgagctcttgatttccaagagatagaagtaaacttatttaaagaactccatgtatacctgggaccatattttctaccctcatctggacccaatgcttcaagaattcagagaataactatatctccttcataatctccagcttgccagggcattcctctctgctagctaatcatggggctctatgcatctccttctgatttcttatgagtggggcctagtttagctacttattcaatataggctgttcttctcattcatgttcatgctccctctccctctccctctccctctccctctccctctccctctccctctccctctccctctccctctccctctccctctccctctccctctccctctccctctccctctccctctgcctctccctctccctctccctctccctctccctttccctcttcctctccctttccctttccctcttcctctccctctccctcttcccccctccccctccctctccctctccccctccctcctccttactcagaccccatgtgtttctttatgcctacttactaccttggctctacatgggctgttcctctatcttctccctactttcaggttttacccacagtgattccaggccatttttaaaggccataatatggctatttccttaaaaagattctttttatttgccccctcttgggggtctatccttgccaaaagagaatcaccatgtgctgtaccttcatgtttattcattccacatgtgtttattgactgcttgctctgtgccaggcatcagggacagatacattccagcacacctattaaaccctccagccgtacaacagctctcgctctctgttgagctatctggccacctaagtggttgggaagttcagctcgagagcttatttaaacctgcctcggatcccagggagtctccctgcaatgctgtggttgctctcagcctggcctccagtgtgcgagagtgggatgtgggttaagtcatgtggtgctatcttggcttgataccatgggcctgctttcctttcctgtttatgtggatctcgggtgacgttcactctcacttctcccaggcctgcaagggccggactgctcacgggagggatgtttcccataagatgtcatttacgatttctctgcctcagacatcactcaggttgaaatgggactgaagtcttgtattttacacaatctttgatcccttgtcaggaaaagcattgagcacttctcctctcgtagcccacgtgactcccctgcaatatctcaggattcctcgattttaaaaaccataaattagcaaatcatcaacatatcaccggggaggttcatctggtagcgattgtagtcagaaggaaacatgggccctaataactgattttcacaaagatacaaagaattgtagacagacagatacagtaaataggaagacaaatagataattcaagctgacaggccatcttgaactgattaggcattctgctttgattagcattaaactttttgtggaaagaggaaaaaaagaaaaaaaaatgttgccctcatactttgggaaaacgacccctgatgacttctgaaattgggcactgagaggcagatcacagcgcatttggcattagatgccccacatgatgtagtgtcccaagtagtcctttccaatgacaggggccttggtgggtgtggatgcagatacttcctccttggcatctgctttgggtccttctcaggcacgtctccagtccttttcaaacttgaacatctgaaaagagacttggctgcatagtcaatcaaactctaggtaatgcggatgggatgaaggcctcccctctgccccccttccctgctgtctttcttcccttccacacacttagcagaatgttccacctattgttctctaaacaagaatagaaatgtaggtgggagatgaactgggtaccttgcggggtgggggcgcattcaagcatcgacttttgctttcaaatatcctacctccatttacaaaggaattctgattgtgaattttctaattataatcccgaaagattctttctgctcagcctcatgtttgatggagtgagtccttgctgggtagatttagaatcccaggaacaaatgcaagcatccgagactaagttgcaccctattttctgtcttcctgacatgccattcattctgatagaagtctttccagagttgcgacgagcagttccttgcagacttggggttctttccaccactgctgtcaccatgctctgaaaataaaacagcaaactttctcactggccaagtccagcgtctctttgtattaaaatatcatagacatcaatgcagcatgaaggatgtggaaatctgattctgttgctgtcagagttgaacctccatacagtactggtattacatggcagcagcctgctcctttccccacaaccgtggagatttgctctgaccgtgggtaccagttgtcagtaaaggtcattggctctccctcctctgtgcaattccaataaggagatgtggaggcagatcagagatgcatgatgcttctcacagatgccaaagggtcttgccagcttgcatctaaagcagatttaggaaaacacccattccaacacactggctcaacaattattcaaaccctcccatgagccgggaattgtgctggactccgtggtgaagaggagtaagagattgtgattgttgctctcttggagagtatgtgagaccttgtccaatcagagctatccaaggagccagtggcagctaaacgggagcttgattatgtagtaacatcatcccagtgagatgttcttttggctggaatttggtacaataaaatcaggaaggtgtgaaataatcatgaaggcaggaagcacattagagagagtgttcctaagagcacacgataactcagtgtgttcctaatgagctcactggggctgtttagggtagaggtaacagcagaaagccagtgtgcctaaaaatcttacagagctaataagcaacccaggaaagggggctgtggtgacattcaggagggcttgggacctggtagtaacattgggaagtccctaggccagacaggtatccttctgtgacatatcatatcatgcctcagcaggcttttgagtctatggctccttccaaatctcctgagagttgcagatactggcattctatgaaggctaatgccagtagagatgctcttcaacatcagatggttgttacatcctgataagcccattgtaattggaaaataacctgtacataaaatgcactcagtgtgctttacctactgagcatatgagtttaaacctgcctaacgtaaagtctacataaaaacattagtctatagttgggcaaggccatctaacacaaatccagtgttggataaaccacataacttgtttattgtcaaattgaaattgaacagaatggctatacaggtagcctttggcatcagtcaagtagaaagcttctatgtggagcctgcctattttggagagcatctgtatgtattttgagtatgctcagagagaatggccagcaacttttgctggcttaggcagcacccattgggtctagtgggtgagaagggaggatgcatctggctgtcacagtgagacagccagtcccagtggcagggtaggatgcatgacttgccaggtgtgttagggagaaaggttgcactcaccttacaaatcaatatcattcccaaagagaaaactataaacattttacatgtttggaattattttttcctagtccaccttcatttccaagtggtgaggctggcctgtttgggtcagtgttctctgagtttgtccaggtaaggccagtgttctctgtgtttgtcccaacagcagatagagacagggaaagcttctttgatctaaagagagaaatgctgttcaggaaaggaaactgcctaggatgaaaaagttcgcatcaaaggtgtcctgctctattgagaatggctaaggatcaccgagtcccaagtaatgagatgaatgagatgtaaaggccagagtcaattaggagacccaaggaagaatccatgtaatttgtggttgcatcaccatggtacaattagttattaataagtctgtctaaggcttgagatgaaggccaatttgtagaggacttgctgttcaaatgtaaggtcctgagttctggatccctagaaagtatattttaaaatcgagacacaggagcacatatgcataatcccagagctggggagtcagagacatatggacccctggaattcactagttatccagcataaccaaacctgtgagctccaggctgagtgagagatctcatttcagaaaataatgtagagagtaattgaggaagatgcctgatgccagcctctggcttccatgtgcacatgtgaccacctgtgcatgtccagatacaaattcccctctctgaaaggaaataaaggagaaaagagttagcaaggtggcagtgatgtgataaaacctgaacactggaatgggtgggttggggagcaggacagggggaggatatagggggctttggggatagcatttgaaatgtaaatgaagaaaatatctaataaaaatataaataaagaaaatatccaattaaaaaaaaaactaatgagaaactgaagcaaaggtcaaccaatctacccttagagatctatggttgtaagcaacagagatggatttttgctgactaagcaattttttaagacccactaaagtaacttataaaatccaggagaaatctgaagagcaaggtcccagaaaggacagaaaacagccagaaatgaggctttgccatccaggaagcagaaattcatggtcattcattacagaatttggccaccagcgtggttcagttgttaccattatctcgagcaatgattagactctcttggatgtggaaacttgattagaggaaacaaaaccatgtgtaattaaaagtgagatatgtttgacagaatgaatggtatatgcttgataggtggaacccacgcatgctaaggctgtctttgtcaacccttggattgaaagtccatggaggttacaagctacaagagatgtgtagtcattccttacctgtagactgactctgaccctgtgtcctgcctgattatggagatctcattatggtttggaatggtggctgagttctcagctataaatgacaaagtgcatcagtttttcgggccaagttctgttaaagggctccccggtctcctctgatgggtcgttcaatgctctgttccatgaccttggagctctgcttcatgaaggtgcctttgctgtttggatctgtttgctctactgtctgccccatttagtgaagcagtaaagcagcctgccttttccaaaatattcctgttgacagctgcgtaagacgattgctccattctcttcctcaccgggaggcacatcacatttccttcctttctcattagcaaagcactagatgtggccaagagtagatgatcttagccttaaacctgcttggaaatccctttgccttctcatcctttcctttcctttcctttcctttcctttcctttcctttcctttcctttcctttcctttcctttcctttcctttcctttcctttcctttcctttccttcccttcccttcccttcccttcccttcccttcccttcccttcccttcccttcccttcccttcccttcccttcccttcccttcccttccctcctttcatctttctttttatccttcctttttcttacaggaaatagataactattttatagtcaggttgtgactgtgggcatgataaatactccatggttttgttttcattttttgctcctttatggacttggggaaagatttctggaggctgagttggacagccattcttacagtttactgttcaatgttgaccatgttgcctctgccttagtgtccaagccaagcatacttttgcaacaaataagtcttgaaaacaagtggcatgtgtctgtatgtgcatgctgaactagagctagattcttggctaggatgggaagacacaaacaacaggctctagtcagttttctttgattgttggtgtcagtctttccccatagtcaagacagactcctaggaatagatttttttttaataaagaagaaagaaggaaggttggaatagatgaactttttattctgcagtgaggtcacaagccagaaggagaaggactgttctgaaggcacaactcgaatcagggccagttgccttaagacaacacagtcagaaagtcacagctgggtgatgtgacaagtgaagcccaggtttcatgaggaagaaaaactcaaatttaacccagcagggcaaacatgagcttggtactgactaccatgaggcctgcagggcctctaaccacccaacttctgtgtgacaaaatgctacccattcttcttgccaagcgctccttaaaatccaatcgactcactccgggggctgctaatggtaggaggtgctgggaagatgtgggatgagagaggcatgattagaaggctcagcagaaagacagaagagagtctagcatatgtatttgatataaatattatagtttcacagagacatctagatcaatacatgccacatttcatctacctctttgacaaagtgagtgcaatgtattcagaaaaagctgtataggattttcaatttactccgtatgatttattgtgacaggatggctatgggtttcttaagttctttatacttgttccagtaaaaatggatatagtatctttaaaaataaacagcccagagacatgcattttatactatcttctggtgtgaggcctggctaaggagagatctaagacctccccgaccttggaagacctgattgtggtcagatttgcctcagtccttgctctttggcttttgggagactgagggggttggggggtgggtaaacagggaaatcaatcaggaagggattgcagacgtctagatgagataaaatgatgacaagaactagcgtataggcagggagcaagcaccccatagggattcatgagggtctggtgagtgaggtcctgtcagcctcttcactggctccaaatcacagaggcctgaggctccacagtctcttgttacctagtcaaggtcatttccacctcatttgatgatgcttctttttagaaggcatcaaatagagggcgctgttctgctcttcctaagatgcaccaaatggctgagcatgtgtcctcatcaaaaaaaaaatagaggcattagacaaagtgtgtgccatagaccctctgaagttaagatatactcagacatctgcgtggggacctaccaccaaaacctttgcatggtgaagtgtggaatgtttcaaaggtggttggatctcagaattactgcctggtgtgtgtgtgcgtgtgtggaaagtgtgtagatttttgttttcatcaaactaaactgactctcaataactccctgatggcccatcatcagagccttgaaaagccccatcctcctcttatacctcttgccctaaggccatcctgaaacagcttgccactcaaccctggaatgttgggcttcctggcccaccagaacaacacaagtagagtgactgaggagaacatagatgaccacattctagaggtggaggtggccagtgatcagaggagcactcataactatttggtgatgaatgatgacctatggcataagtaagtggcagttcccagttaccccttagagagtctagtgtagctatacattggtctattaagatgcaatcacactcaactatgagatgccttagttgtggcagtctatctatgctacctatccctaattaacccactctttagggccctcactcagtgccagtactggataaataacttccttccaccaagtcatttgctaccattgtgttaatatttaacacacttccttgttcatctgagatggatctttcatctaagccattaatattagcttaaatttatgttacctttgcctcagaaatatctgttcatccatcaagctttgtcccacctacacgtgtcaatcagattaaagtagaaatggctactgatttagatctgttgtctgtcttcacagttctagggatcaaggccacatagagtccaggcatgaagattagcattgggctcaaagagccagagccacacatgaaaatggtttggttcctttcagtgtgacccatttaaataacttctgctgtaaatagtgatctctttgttatccttcagattcctggtctggtgggagttctcagctccataggaaagcaaagtctggtccagatactgacattccttttgtagtcccttattttctcacagtgtatgagtaaagttaaagtttggtttagagtctgtgcacagtggctttggtaatttctatgtctcttatttttggttgttgtttgttttcttgaaccttctgggacaattgagcagtgtagcttacactagagatactgagaaactatgatgtcttacaggggaattttgtctttgtccatcccattcccacaacaaacctctctaaacctctaagaactgcagtgcctcctcctccatgctttggctaatcctgcccaccctgagggaaccaaccttcttctgtcagctccctctccttgagcactgaagtctcaacacttgggctatatcccaagtcagtttcttttacttcctgtgaacataagagatgcatctcacagaaacaatttcagaggggtgatctaaagatatgcttatggtaagaccttgcagttgtttgaggattcgatggaattatacaagccacatgctgtgtactgatacaaagatatcacacagtccctacccgtttaggaggctgatggtagctcctttgctggcccatccatctattagctttccaagaagatcttggagataacctcaggaatgaatcgctcttcacagtgtctataaagctctgagttgttgctcctaagatgaaaaattggtgagacctgtcaaggactatgtaattaattagtgtctgacatcagagtatgaatctcaccaggcaggtctgtaggtatcgtggaagccagcagagatcatttggacaagaatctctgaccttcctcaaatcatgccctgtaaatatccactgcttccaaggagcccacgctctgctctcaatcataaactattttcagtcatattgcataggtgggataatatgtatcatgtttcttctttctgaagcaatattcctccccaaactactgcctgcaagatgatctccatttgccaacctttccccacgctcccatagggagtctggagcttcctcagacgtgggccgccaggtctgatcttccagtgctgatacagggctagagatacggcatctccccatccatcaattctgacgacattcaaacattttcaatatgtgggctccctgataacttccattgtatggaaaacaaaatggagggaaatgattattggcacaaagggggaaggccgtaaatcttcaaatcagatacaggacagattggaacaatatggcttcttcaaggttgccatgataatgtacctaataactctccctgggcaaaaaggcaatctgctttcaatcaatcccctacccccagcgttccccccccccttccttctgagcaaaaataccaattatgttgaaggaagatttttttcttccttttttgataaggactgctctccaccccagaaatcatgctgtagctaaaagatatatattttcaattgtctagtatggtatcagacagctagcaccaaattgaaaaaaaaaaaagtcaatctttttacccccttcctctctcctgccagcatttgtctactcacttcttaagagaagtgaaagctaattaaaggcttaagggataatattgattgcattggaatatattttatatgtacccggcacactttcaaataatagaaccatgactttttctaaagctaaataaatcagctggctgaacctttgattcaagggtgatgtgttggggcagggctcatctcctccccttccacttcacacatatctctctcaggatgaatgatttcagagcagcaatgggggagggggaaagatgcatacgccattccttatgtacaggacaggaagggtgaatgttcagctgtctcgagccaccattcatttgagtctggccttgaataataagcaggcatattctagcatagaacgctgaagtttgcaatatccgagacagaggcttagctaggtaggatgaagttctcagcttctcctgtatggactggaataagtagcttgtgtgggacatcctctctttgccatcaaaacagggaactagagttcttccttacctagcttgctatctcagctaagacacagacagccccagctgcagagatacctgtaaagtagattcctgtcggagcattctccttcctagtgtctttgtgcaggacattagaattcagcagttaacactattatcacttgtgtggagttgaagtcagggggaaaatcctccttcttggtcattctctggacatgcttgtcactttagaatcataaatctcattcagaacctgcatagctaccacattttgcccatacatgcactcatgctacaagaaacattttaagatatgatgaaaatggggaaaatccaaatagtttgtttattttgtgaattcagttacatagtatacttcacagccttatagtcagaagggttcatgatatggaggttcgggcattaagtttggatgagtggctaagtgaccccccaacctagcaggtgctgttgagagggtgatatgatcatgttaggatgtctcttctgaaggactccactgccacccttccttcaccttcatgaccgtggcttgcctgattgctaaatgcaccaccgtaacaataacagttcataatggcaatattattaactgtaccgcacatattattgatttactctttgttctgcaccattatcctttccccaatgagtatactgcattattctcacatccttagtcaagcaccaaattaccacaaaagggcaggctcttgtaatgacgtctaatgggacatcacataaaccatcaccactgcctcctataataagctgcctccagccaatgagcgttctgccatattgaaatgcgatcagagagattataaagggcaaaggacctgggcactctgaatttttcctgggaaattgcctcactgcttgttcaccacctgacgtagtcttaaaacacactagagatctatcctctgtaattgtcagcctgcaaggtagagaggggtaccagttcagctatttagcacagtgactttgatagaagccaatgcttatggcttcatgactaagccttttggtcttagggccaattttcagatcctgatcttgtgattgagtaccatgaagcatatgtagtgaaccaaggatacactgatgttcaggtcacattggtttaggaagaaatgctagagaagctgcaggtcttacatgctctggaaaagggtctcacttccttgggatgaatggatatttctagaaacagagttcaaactacgcttgaacaaagccaaaattttcacatccgttacatccctggctcctgcctattggaagggtcttcaggtgaattagtttagctcttgaaagcctcaatactcagaggcagcagccctctggggacacggtcccagcagccagcttgattgtccattccatgggcatcccatctccatttagccctgagtaatgctcacttactgtaaagtgttacatgcctccattgttggagaagttatagtggaaaaatgcaaaatctcctttttactgcttatggccagccgagcctataacgtgtcaagccgtacattagccaccctgataaaagtcctctttcttacacacaaaatcatcgtttcagcaagatttgttatctcattacctgataagctgtatgtcataaaccaagactgctgcggtaaatctcccaggagggcgctttgtgggcagaaagggggagataggaatctgcaagggacttgataatgtagcatttaagcacaagcgtaatgtcacttattgttaaatgcataaaaccacttggccaagtggctgggcttttaataggattttgtgcagcatcaggtgagcagccatatgcctttttttttctgtccaggagcctctgagcaactgttagtgatatcgctttgcctcatgaccctctggggatgggtgctgggtactggggctgagtggggagatgtattgcttcctctgctgatcagagatcagggtacggggtcatgttgctgagtctggttggctctaactgctttctcctgtacaggcacattgtagtctgtggacacattactctggagagtgtctctaacttcctgaaggactttctgcacaaggaccgggatgatgtcaacgtggagattgtctttcttcacaagtaagagccccctgctgccaccagaccctgccacctaaactcatgcttctctctgagtgcctagaggtggctgggaattaggacagggttaaataagccatgattggtgctggctccttaggtaagaggtagtttttctgaaagaatggggaggttactttagaacccttggatcatgaagcagcacccttgttcagagctgaaagcaaactccagtgaggcagtctaggagtatatctgagtttctttctaaaagattcaacagtggaattccctagtcatccaagttaccacccttgtaccttcctcagtgtggacctttgcaatcggctgtgtctgttgagctggggtaggataattaatatagtcgtatggatactttaccaccgtaggagagggacaagcaggagaagaggagaagaaggctgacatagttacgtcccacactgctgtggcaaaccacctgacaaaataactaaaaaaaaaagaaagaaagaaaggtctgtttctgcttgcagtctaaggatccatagtgacacggtaggagaacacggtggtgagagtgtgaggcagccgttcacactgcatctgaattctggaagcagagagagatggatgtcagtgcttagttggctttctccttttgtatctagtctgggaccccagcctataggatggtgctgctatgttcatggaagatcttcctaccccctcagctaacccaatctagataatccttcatttaaatgctcagaggtttgtctccaaggtgattcaggaccctatctggttgacagtattaagtatcacacaatgttctacgaatattgatactgttgttccagagtttccatttggctctgtgcagatggattcccatgtactccacagacatagtgcccattgcttctttagttaatcctcatttaaccatggacttcctgggcaagttacttcacttccctgtgcctcggctcccatgactatgaacagaggagacaattctacctccttggactatggtagtaacaatgaaatgaatcactccatgtgaagtgtgcagaacccagttaggtatgcaggaaatgctcattaaatgccagctaaaattgtgaaagaaaatctgactaggctatacagttgacttaaggatagattccttccatgtaaatacatttaccatgagcagactcttgttagggcattagcttactcaattctggaggctgaggtgttccacaatgtgccatctccaaattgaactccccactcaatgagtcaatccaaacttgaaggcctgaagcaaagggaggcagtgatgggaaatccttgtccacagaggaaatggaagggataagatgtcatggtgtaggtatataatgaccaatgaacactgatgctacaactctggatttcccagtgatagcaaagaagaggacagataggccctactctttgcaaggctagagaccttttcagtggactgagtgggtctgttctcttgaatgagtctttcatttaggtcagggaaggaggcttctctgaaggtcagggcctttgttcacatctttgtgtggaaatgaacaccgagggagccacagatctcgctctgctgctttaacagctgtctctcttctgtctctgcagcatctcccctaaccttgagcttgaggctctgttcaaacggcatttcactcaggtggagttttatcagggctctgtcctcaatccacatgatcttgccagagtcaaggtaaggagaaacaagtgttttcacttctctaggggtgaggccatggttcccaggtaggcagactacaagccatctcctaaccattaatgagatgattcagatgttgctaactccagtccactcgttcattggccccaggaggtcactctgctgggggctcactcaagatcatcgataactatcacacactcaggttagtcttaatataaaacctaactctgctgttttctccaaaatcagccgttcccaatgcaggaccatcccaataagggccatctcatcccagcagttcagtgggtaaaggcatttgctgcaaagcatggtggcctgagttagatcgccaggatctacttggtaggaagagagagccaactcatacaaactgtcctcttgctttaatgcacacaaacacacacacacacacacacacacacactctctctctctctctctctctctctctctgtctcgagagacagagagacagacagaggcatagacagatgcgtagacacacacatacacacatacagacacacatatatacacagaggtatagacacacacacacacacataagtaaatgagagagcaataagcatttccaagaaactatagaaaaaaagaaaaaaagctacagttacttaagacaaaataggactaagaaaacaaacagcaaaaagaataacaaaacaatagcaaaaccacacacgtttcaacaatatcttgaaataggaatgccaacaactcaatagttgagggacacaaattaggtgaatatcttaagaaacaaaccatctttttgtcatctgcacaaatctcatgtaactttcaaagatggccaccactttaaggtgaaaaaaatagaaaaaccatcctaagccaatgggagcaggaagccagcagatgccaatactataatacccccaaataggcttcaaagtaacacccatcaggagagacaaaggacacttcatgctaatcaaagcaacaattagcaaaggaaatagtataatattaaacatatatgcaccaaactctggtacgccacatttcataaagcatacacttgggctgaaatatacagaataactccaacgctataagaatgggtgattttaatactccattttctctaataatacataaatgtagaaaagtttaaagttgagatggcttaaaaaggcatgcacaagagagcatgatgaatgattagccttcaccagattgagctcagtatgacccccaaatctattattgtgtctaaaagaaaattacagaaagctgtaaaccatttgagtatcccttttccaaaaccagactactatcagttggtgataaggtcatcgtattcttcctggacccctcaaagcaaccatcttaaagtacgtgcaaggctgtagaaagaaagggacacagcaaaccaatatctgctattttatccatcaagtccagttgtcataagtatgcacaacacttgaagttcattaatattatgtgaacccaaggaaggctaaatgctgactgtggccaccaaagagttctgtaattgctatagcagcaaacatagacaatctgaaaggacttgtgtaaaattctttacactattaaacaacgtgtggcataccattgagggaaccagggccctcctaacaaatgcaggaacagcctaggaagtgtaacactatgagcagaagaaagtgcagacccaggttagcatgagaattctcatgcttatgaaggctagttcatcttaatattatccagacatgacccaagtcataagtacaaagaaaatggcttttgttcacaggcctaatttaaatgcaagcaattattagcacatcaaactcatggtctgtctacagaacaaacccccttttggctcacattaagataagtcactaggttgccttttggatccatctgcaacttatcatttcatttatgtaaattatttgccttttgaatacctgagtagcaacgaacagaaaacagcatagagctgttgtctattgaaggctctgatttctcactgggacacatggaatgaacatgtgcataaggtttgatgaaagaatttttttttaatttttcttattttaattttatgtgcatgagtgctttgcctgtatgtgtgcatgtgtactgcctgttgcctgaagtctacaggtcagaagagcgagtctgatgccctggaactggagttataggtgccgtgagctgccatgtgcgtgctgggaactgaacttacctcctttccaagagctgcaaacgtccctaatcactgaagattcggccccttgatgatcagtccgtgttgctgaatgtgcaactgttttgtccacatgactatctcggggaaggggtttaacccaccaacctccacttcctggctggaaaaatgaggatgagggcacaagacagttgaaagaggaagtagggattagattgaacggcctgattaagtaaatttgaaggaatttggcaaagatgtctgtaagcagctaggccaaatgaagaacataattactcagattcaagctggaatatttatcctttaacaagaaccggacctacaacctacacttttgacaaaactataatttatatatatgtacatatatatatatacatatatacatacatatatatatatatatatatatttccttgaaaaaataccaggttctctaaaatactggtagcaaagagagactgcagttgagtccaactatatgtttgtgtttattatgatttttttccttttggtctctcagatagagtcagcagatgcatgcctgatccttgccaataagtattgcgctgacccggatgcagaagatgcctccaacatcatgaggtaactcaagggatcaacagggaaggtcttggactggtctcccaatagcctgcatgcaaccttttctttgggtctccagaggactgtctctgtggactgcctttccttcatggaccacagagcaatggctcctgtacagggatgatagagctgaagagagcattgacatacagggtaccaaagagagtgtagatatacagggtaccaccaataggaagttcagactgagaaggtgccatgctgatgctgatagtgcctcttgggtttcagattcctagagaaagaactaaaaaaggaaagagagctgcaggtctgagttaaaatgatatgttcccagggctgggagcacagctcagtttgtaaaggacttgctatataagtggagggggttgattttgaaccccagaaccaattttttaaggtgaagttctttagcacccttgagtctaaggaagcagagacaagcagattcttgggactcactggccaacttgcctaacctaattaggtaagttgcaggacactgagagaccaaggggtccacatttaatgaacaacattcagtgccaacttctgcctccatgtggagttataccctcacatagagatacatacccataaaccttaatttttttatagatttttaaaaaaaaataatatgttacctgaaaggaattagacctaagatatctttacttgggatggtcttacctcaagcaggtgttttgcatcctgtggagatctttgcactagactcagctagcagaggggattgctggaaccctgtgtatagagaccagtcatactgccaagtgtcccataatgcatggcacagtccttatctagaagactgtctgacccaaagtgctgatagctgaggaatcctcattagtgcttccctcgtgtgtttgcatcaagttgatcattactgccctgaaagctattggttcgttagcttgtctcagattccccagatgtgtgttatgcagtggttttaacattcatatgaatttctgagatgctgaattatatagattatttcttaatcctatttggattgaagtctccccctcctcatcttcctcttcttcctcctcctcctgctcctttcttttaatagaccatggtctggggagaaaacaacctagaccgccactagtttgtacctgttctgcaaatgggctgggcctctcagagcttaattttaactccaactctaatgccttaagttactctcacttcagataaaatgttttctttagctattattcttcccatagatttgtcatcatatcctgtatctataaaatcacacacacacacacacacacacacacaagaaatccaaacatttttctctcattagctaaaaatccttttagaatttgccttttctgtggtataaattatggaagagtcctttgaggtaggggaggatgataaagagaatctctggagagagcatggaccaggggaaagagttcgttcacttccaccatatccccagcaactctcccttaagagtgaacagctatcctttggaccaggcatgctccaaaggctacttgcagtttgcttctctgggacccatggatttacctcaaggtgagagttgagaagttgcccttggggctttacagtgctcctgagaacttcctcttggctttaccgagtgtccaccagttacatgcactgtcccatcgatgaggcagaggaattcctctccgctcaagtcttcccatcagtgtcttaggtctggaaggagccatccggcatcatctctctttccattcccattccttctgcagtaggcttggtcccatgttttaagaaaatccatgtataatgacttggtttgcatgggacttcacacaggagtacatctccttcctggtcctccctagaaagtgatcccataaatccacttcagtttagaatgtctcccttgtcattttccaaatggaccaagcggcatttctaccctttgacacatattccccgccccctttttatttaaagtgataaaaatgtagtccctcaagagacaaggctctatctctttccatattgctaacaaaccaggaagatgaaactcatggtgttgacctcacagtgaagttcctggcatatatactttatttcttctgttatggtgagaaatagaagtgaatagttactttgaaatgggcattgctcataattggaatattttattcaaaccctgagcatgaaggggtgatgtgagcacacatgggtaccagggggaattgtgggatgtcagggtatagaactcactgggtcaggatcataactaagctgtccactatggagaatcaggaggaagacccaaaagggagtgggaacctcagggttaaacgtgggctcagcttttcttttatttgtatattcctccttagcttaatgagaccaatctgctgcttttgaaattaaaatgtcaaagaggcatttgaaatgagctaatgcagaaagctgcctggcgctgtggactgctccaagaggctgataggctcaaaagccttgagttatacacagaggccaatatgacacactctctcaaaaataagagaggaagtccttccagtgcacagtgcagggaggggctttcttggggaccgtctcccgactgctttggctgcagtttccttagatgaggctgctgtctggtggccttgtttgttccccactccagttttgcagaaagggtggcaaagtgaagagctgagctcagtgggaagtttgcgggggcgggggagataattgtgcttgcgttcctgatgaggcttaggaggtgggccgttcactggaatttcattctttagccttccttgtcacagaaggaaatgtacaatgtcacctctgacagggttggtaatgacaaaagccataacttacacgtggagagagggcttttaatgatttcaaagcattttaacatctggcttcacatttgtccctcataccaagcctgtgaagtaaacaatgcaggtaccgttgccccccatgtccagatgagaagacaggaacagagagccagggtatttccggagggtcacccagttcattagcacaatagctgtgctggaaaccaggtgtttccatttctgggctccttacatcttccctgtgctggtgtgattgacaggagaagtggtgccagggaaggttggctggtggggtcatccaggctcagtaaaggtctgagggcaacaagaggggatttcccaccagatcaccatctctgtagggtgctaatggttaacttgaaccagtggtcaagtcagcattatgctgtggaaggcagagtccttgatcgtattccaagagaactgcttaaaaagtcatattatgagaatgtccaaaggatttgtgataatcagagccatttgtcaggtggcctgtttgagttgtcaacattgtctcaagttgttaaccagaagctgggtgctgggagactgtagatccccagaggcttaaggtctaggcttgcattacctgtctctaagcatcaacagcacccatctccagtccattcaagctccaactccatttcccaggcaacacaggagtcccttgtgtttgtgtgtttgtttttaaggcagagtttcatggagcccaggctagctttgaacttgctctttcttgtcaagtctggccttagagtcctgatcatctatttccatcatcacgtggtatggttacagggtccattactacttttgcctaactctggtatttgaagtctctggagtatatgccagtgactgccttgccatttcttttttatgctactaataggtacagtgaggagaacacttttctccctgggctggtacccaaagtcccctggatggccctggttgctaccttagttgcagtcacctagttaactgaatcttccatcacactccaggttacagagcctgcttcaggtctggttctctctctctctctctttcagagtgatctccatcaaaaactaccacccaaagatcaggatcatcactcagatgctgcagtatcacaacaaggtaggtgctgagactcttccagacctgaaggcatccccagagcttgggtcccgacaccttctccctctccacacagcctcacatacacatactcacataagtgcatacatacacatgccctgaggcagaaaagccatagttaaaatgtcccatctccctaggatagctcttcagagaaagcagcttgctttttgttttgttttgctttcttttgttttgcttttgttttgttttgttttgttttgttttgctttgctttgctttgttttcgtggtgggttattgggaggaagttcctttgttgccctcttgtgctaattcattctttcattgaaccctgtggctcagaaatattgatatgttcttagatcctgtccagacctaaattccaacaacttgcgtttctatgtcctgcagtcattcagtcaatagctattgaatacctactctataattaacactcctcctgctactcaaagggtaggataactaactgtgaagataaaaatctgattttgtgtccttagagaccgatcaaggaaggtgtagagactttaccagagaatcgaaggacttctctatgtgtgaccaggcacacatgaaggaacatagtataagttgggtagagaaagcagaatgtgacatcatcctcaaattcacaatgggaatctttccagttatacttagggaggtagtagtttatccaaagattatacttaaaaaatctccccagtgttacagcttctagtgagagctggttagaaagaacatgaacatgagagttagtattgctgtcctgtagtttcctctcactaaatcagaggtgaaggtctcttatccaaaggcagcactccttcacctggcttgtggttgagctctctagacagctttggaggaaggaaaatggcgtcttgttctacttgatacaataccagttgtcttcttaatggagcttagagactggaggtttctcagtacctggggccaggtgtcctgactgaacagaaataactccctgcaggtttatgtgtgacagcatgccccatcttataggccatattctgtgcaaaacaagccatcaggtgacccagagaaaaccccactctgccaaatgccaccagcaccattccattatttcttaattgctggcaagtgctggcccattttgctgtgtggaggcccatcagaggccattgctgagtgggtcctgctgtcagcaactggcccactgcttggaactgctgcccagtgccgaccattgcccagccctcggcaggtggctctattggaaattctgttactctccagccagtgggtttggtggtgggcactgaaggtgaatctcctgtttgtccctgaaaactcaaggataggataaaggagttctcagtaattcacaggcatcaacctggagaagttcttgactgaagtctctgtaggtggaggtggattttattagtgaggctgtgactggtgacagctcctgctgcaaggaacactccttctttcatttgtgacttgaaatctcatttagtgtgggagtgctttaagcgattgtttagatttttggctgaatttagactgaataggaaaattaatgttgtatgtttagaaagagatgtcagttccttttattctctttccaacgtgtgctgatgtagcatcttcaagaaattaaggagtatttcagctgtgtagttcttgtcaaactggaagcaacatgactagcctcagagccagatggtacctggtcggtattcacatgactacagccgcccaaatatcttggacagaatctccaatccatccatttagatactgtgatgcagacatcaacagacccaggagtatttccttaaaaggcatctcatttagaaccaccccactctacttaggtctctggtcaggtaaggtcattttcagagcactgttagattagtgaggatatgggaatagagtaacttcgagacagggcagttttctctctttctgcatctcccttttaaagggagaattcctcttgcctttatttttcagatcattcttagatttttgagtagatagttcttcccccccgcttcattactttgaattttcctaagggcctcccacccacctttcccacacactcttcttctttttcaactttttcttcttgtggccttttctctgtgcccatctgagaaacacatagaatgccacccatttatacacgtgcttgggaaagacctggtgtgtgtgtgtgtgtgtgtgtgtgtgtgtgtgtgtgtgtgtgtgtgaaaactatgccaccaggagtatattctggagggtgtaattgctcccacagttagacacaaggcttgaaataaaaacactgtcaaatccctgtgatgtaatgagggtgatattctagagcccagagggatgcagggaaactgctggccttgagtttgtcatcataacaattgcagacatttgagtcctgttttatggttttaaaagagctttgacatccattatctcatttagtcctcattgggccatctgtgcattttagcatcccagtgtaacttcagactagcaggagtcaaagctctattctaggcctatcaactctggtaagcacaaatcaaggtcactcagcagccagcaggctaggacagtatagccaactgctaccttctatgtgaatgggacagtagcccacagaactaaacttgggttcctgggggaaggatagtattctccaaaatggatctctttacagtggctaaatttcacagagagaactttcaaaccctgggcatctctgagtgcggagggaagaggtacatggttcagagctctccagacacgggatggtgatgtgacgctggtaaaggtgctcattctaaaaactcacctgttcatgcagctctcatttcccccaaagcactctaatcaaagaggctcttgtctctgatttggaaactaagccccagtacagatgctagttctttgagcatccttgttgcctatgatggcatttgggacacagccgtgttaaccagttcctttgtaactttcctgtatctgtggtgaaacactctgacaaaagtcccttcatgaaggtgggtttcgtttcagctcacagctcaaggctccatctatcatagtggggaagtcaaactaccgagagtgtgaagtagctggtcatgtcatattacacagatcagatcccattatccacttatacagaccaggattccagccagggaatggcaccacccacagtgggtgggggttccaaccttaattaatagaataaagataatccttcacagccatggccggaagcctgtctcctggatgattccagattctgtcagattggtagcacaaatcttcatgggcaactttctgtcactcttccaaatgtatgccataaaacttttggaggctgtgggccttgatgggttggccttgtttagttatgcttgtgatgaggcaactcaccattctgggagagattgatagaaagcactggattgattcctatccatcagaccaaacagatagggctgattggtgccctgttagcctcttacaaggcaatgctctcaatgacccaaagagtttttattaaattctacctcccaaaggctccacttgctcctaagagagtatcaccccagggatgaagctcttagtggacattgacgggagatgcagaatacagagtactgttgctgttccatccttagactttgtcatttttcacagtatttctccaaggctgaatatatagcaagagagagaaatgtgaccagaattcatttcttctgccttcctgaagcagcacattttcatagctcttctccatgaaatggaggatgatccgccagcataaatggagtgagggtgtggttaatgttggacctaatttttctctttgccaagctagaaagaatttgcctctggattcctgggtagaaatgctgagggtttttttttttttaccagagccaatttccctcaaataaaagaggatgaagtttccaaaaacaaaaaaattagagttcctgggtcaatatccactcttggcttcccgcacatagccttccctcttggtcattggcacttcatccctgctccctgccaccgcatgactggagaaaatacaatggcaatgagaggagacataagaagcttataatgagtatgactttccacatggggcccaagggacccaagggacataagggacccacggcttacatgtcagaactacatattttggaaggcatggggataggacagactgtgttcaaggttgtcatagtttctttgaaaatggcatggaggctatgtggtgtctttgtagagaccagaccacccaaatctcttgtttattacttggatgtaattgatcattcttctcataagagtattctccacatagatgaatgtcttttatactatgccaaggaagtaaaatgaaaaagctgacgtcgtaagccagggaagaatagggaaagtaatgagagagagggtggggctatctgttgacattcagtgtgtgatatgcagaagaccctctggtactcagctccacacaaatcacactctctctggcccacacacaggccgattttactcgggttagggaacaagcagtcattcttccatcagtgaccactgctggcttggtttggagactgtcacagaggtggattttgcaagcaggcatttcataagactggggtttctccaagcagagcaaagaggtctgggctctgctctttgtttctgcaatgtagtcattcatccttttattgcaactggcttctgttgttccaaaagtgaaggaaagactcttttgctgctccagtttgctgctatgtggggagaaataatttcagagctatagactcctggattatacaggtacttagaaagactctgggtcaacttcttctgtaaagcatgatttattatagcattttggaaaaatgctaagtcttagccataaagtagtattctctatttattagacatatttcatccatagaaagttcctttgtcagacaagccaaacccctttgcttccttttaatatatatcaggaaagtcctagatgtgaagctaatcatgacatagcaggacttgaggcatccagatgtgatgaccagcctatgtccccaaggatgtccctctgtatcttgagcatttctggattgttttactgtttctcaagagatcttttccagaacacttatctcctcttgtcctcctcattgctctctggccattattcaattggtcactttgctcttcaagtttgactgttaaaactggatcaaatcctgtggaatgaacatggcctattcttatagaataaagagtcgtttccctttgctctggagactataacaagcaagctttggctttctgtgtcttgtatcccatggcctctaatagaggtttgagttaactatacacttaactgctgcgccctgctctctccttctctctctctctctctctctctctctctctctctctctctctctctctctctctcatacactctcttagatccatcttcttgtttcaaacctatatagtcaatatttttgaatgtaagtgttgaccctgacatctagatcttctaactctcttctcttattattgttatttgtaaatccccaaacactagagaacttcccgaatttcagttttttccctcactctgccatgtacaactctccactgcatgccactggcaaataattgtgtgagcacacctcagggcctgggagttgggctctgacctaattttgccataagagagtccatctgagagagattgtaggatgtctttatctttgctgcacagtggcctccagggaagcagcatttcctctcacatgtagaggtacaggttctccaactctaccccagatctactcagttagaaacttaggatggtgggggctagcaacctgtagtttttgtacacattgcagggtatgcagaaacccactcaagtttgggacatccctaatctagattattgagaaggcaggaaaaaaatgcaagagcacacagacacacaggcatctggcaatctgagatacttgagagccactttaaaaacaagctaacttgacttcttaatgctgggggctggtgtgtctcacaagagaaaaatcccctctggggtgaatctggctaaacagcaaacttgagaggaggatgtgggcctggtgagtgtagaagcaatgttgccaagaagcccaagtctgatgaaccagaagaatagaacagtccttagacccaggaagagggaagaaaggaaaagtttggatgacccggtgtttttggactatgcagcaattccaagaagagatttcagacactcagacatggagcagaacagggtctcatacctcttgttattcccacaggcccatctgctcaacatccccagctggaactggaaagagggtgatgacgcaatatgccttgcagagctcaagttgggtttcatagcccagagctgtctggctcaaggcctctccacaatgcttgccaatctcttctctatgaggtcattcataaaggtaacgtcttgtcttattagagcacattagcctaggattccatttgtcgtggggttgagtacagcacagcttaaactcaaaacagaacgacgggctttaacttctctggttgagaagaaattccttgttacagatttgggaaagaggccagctcctttcaaaattatgtttttatttttatttggcacatccgtggccattaaatgattgttcaaagcacaatcctctctctctctctctttttttttagataaaccacatgtttatctatcaacaaagcctccgctgttaaaacaaaaatatgatttatatacattccatatggcaccagagtgcctaaagaaaagaattatcattttcctcttttatatcaagtggctggtggacctctcactgtgtggataaatgcagaccatgtgtttgtgccgaagcccaaaccccaacaacataattcatttatttacttctgcacaatcaaggaggccagtaaggctgacatgccgtggctatttgaatggagaaagaaaagatgaactgagtctttaccccaagagacgtgcagtctggatgtgttcatctccatgtcagagctctctgggcagccactcccagtctccagatggctgctggaccaactagtagggggaagagaatgaacctatccagttctctaggacccagggccttgagtgcctctgcatctaggtacctgaccaagcaaattttctggagtgtgggtttaggcagtcaaggtggcatactacattggtgaattgtgttacttagagctagaatgtgactgttagatctttacttttgtatcaatgccattggcattgcttaaccaatagtaattggcactgtagttctcatagtatgacttagagaataactcctgttggaccctgcttgtcatctttgtagcagcgttcatagtgaacgacaacttgattgaaaatacattctctcatgcttactccgtgcccatagtcctcagctcaacagaacttcaagttcaaacgcagttacaaataaagttactgcgtgcctctagatgtcttctttaatccagtctctttgtgtcctgcatagatgaaactgaatgcaggcgaaatgggagtcacagggaggtctgtgtggctgtgtttagcgatgggacaccaaagccagatgtagccatgtgtctcccaggacttgtctgttcaatccaaggaggccagacctaggataacgaactgtcaccaggagaaccgcgctggctctttctgtggagccctggtggttttcttccagcagaggtttgctcacaggacccagcacatggtcagagggactggattctgccttccttgtgttgatgtgacatgggccttggcagagccccaccacagatggggccacttgacatgcgtatgttttgattttgtggtgcctgcatggtaactagatctgcctgtcaagaaaattaataaaatggatatgacactgattctacagtgttattaccagcagggacaacttctgcctgactttcctcaggaccctgacaggcctcacctctaaagccaaggacgttccttccagctccgctaatcccattgccaagttactatttaggaagagcctgtgggagaggctgaactgggccctggtataagtggaaacacatttgcctcccagggttacatgactgcattatttctgtccagggccagctcttccatgtttggaggcagctttttggatatgaccttttgacatggaggtggtctttcgttagactttgccaaaggcatagcctacaataacatgccttcctttcctatattttaacatttggagtagggccagtcttatttgatgcattcaccattctctgttgtcatgtgtgtatgcctctccctcagtcctagaaccacccgaggacctggggaaaatcatactccttcgtgtgttttctatattattgcaaagcgtttgcatgtttttgtttgggatgagtgtaggtggagaagagaatatgtaaatggattcttgtttacagaaatcacttccttccccaatacccccacatcctgtggtagagaactcctcaacacttccacacgacccggttttggcagcactttatcctttgggaccacttagagtttctagaagccaaagggagatgtggattcgccttctcccttgctctgggcaggttgtgtttgtttcctagttctacaggaaatattatactttgcttctgctaaaggagtaagataaacaagactctaaccatgtagaagtgtcacaggcagaagcgccgcagttatcataggagcctgttattatgtatgggaccaaaagtccaagaccaaaactaaagatagtaaggtttagcagaagaaagggatacgactggaatataggatacacaaacagggcctagattgaagatgagaaaaaaatacatgtgaataattgcttttccctgtaccagtcactctcaaggacctgaacctaggggccccataacccattaccttctaaaacctcgtcctcatttagatatgtcacctctgaattgacctgaatagtttggaatttacctttttaggagcgatggattctatggctttggttattactgtagacatttttggctttttgtttcccccctcatggctgttaatccttaatccagtccatttatgcatcagtgtgtttcccctactgttaggatgcgctggcatttataaatccatactaactacacatccaatacttttctgaaagaggcctaagttggtacccaggggttctatagctctgtggctgtttgcaaggcaagctaagcacattttttttttccagcacaaatttattgtcacccttgatgtccattactcagagccagcagatgttctggtgcctgtgacttatctcctggcctgggacatcctgtttactccctactctctgatctcctttcactggcctctcggatttcagggagagtctccttaatgtcttctggaaagaccaggacaatagacttgtttagcctgtctgccatcaccttagccctcaatacgtaggccacacattgagagcactgatttgggggagggggttgttgtttttagtctgttcagttttaacttcctcttctgcctgaagagtttcatgatgggccttgaccttccattttatgaattgagctattattcttactggaagaaacaaactatgctgatttttttttttcattttacacacacacacacacacacacacacacacacacacacacacacgagtgagagagtacaccatgtagcattgcatgtaatttgcaaattctttgtcaggaagccaatggtgagaatggagaaaatatgtaatgttagtgtggtggcttaaatgagaatatgtcctctatgtgcttggatagttgaacacttggtccccagttggtgacactatttgagatgccgccatgctagaggaagtatggcactggggaatgggctttgagagttcgtagactcggctccttctgatttgccaactctgttccatggtcacagtttaagatgtgatctctcagcttccagctctggttgccatggttgccatgcctctccaccgtaatggactttccctctgacaatgtaaaccaaataaatgctcccttttattagttgtcttgatcatgatattttatcacagccatgcccgactaaagtgaatcattttagtatctttagtttgggttatatgtatgcgctgctttgtgtttgtacaagtttgtgtttaaaaataatctgttttaagagctgaaaatataaagacctttgaataattgtccaaatatactgatttctatctacttttaaagccttgaaattaatattgtgtctatattatttttactcttctagtgccctacatatacatggcactgtcactagcgtcactttatagtggcagacagtatgcagtataaaaggaacagtcaggtagcttagaattgacaaaccctagatatcactcccaaatttgtccccaaggccaccaaaatgaaataaaggatgagatgattccttagcaagtaaagccaccttactatgtagctttagtttcttggcttcattttatggaaaccattgattcactagagattccagaggcacatatatcccaactgtatttcccgcaacacacagcttatggcttggaatcactagtaagattcaggaagcttctattctgatgggaaatgtatggacacatatttacatgctcttgccaataagtcttgtttacctttctctctggctagatctgtaagggtcagagtcattgcatcagacaggtgagaagttcacttaggttagactgtgacaagatcaagaatgacctgggctctcaggaggactggattaaggagtagggctatctggaaaaaccaaaccaactctgtatgtgatgtgtgaatgtgtacatatgtacatgtaatcatgtgtcatataatggtatttcaatcactggcagactacctatatggtaggagtcccatatcatgtagtgatgtctattcttcttatggtttgaatacatacatactttgatgtttgcatgatgaaatttcccactagagacttcttcagatgtgtacccatcattaatcactgcatgcctctatcatctctctgtctgtaatcaagggattagattagaacaggttgattcacttggcatggaagctttcttacaatgcctgcactgagctgctggagagccacagggatggtgtcgataagtttgaatccctgagaaaaaggcgactgagtatagatttcagtcctagttaaggcagagagaacagatttctaatgactcctagtttgtgtttcattaccgcttctgatggtctggatatgacccacccacagaaggaacataatctcccttattctgatacctcaaaaatattaattgcatccagaaataccttcaaagctttgtttagaacaataatcaaatatctgggaacattatgacccagtcaagttaacaaaactatctatcacaccaacctactcttatttcttgttgggcataaatttgacagcccatttctaggtcagcatgctcatcctcttgtgggagtgtggggactgtcaggatctctagtcagaccagagttgcaactgataaggcatcaaggagacaatggtaaagacttctttgtcttggaactgaaacctgcagagacgatcgatcatgataaataaatgttgttggctctgctacccatgggtgatgccagtcaaagtaaaagtggcttcataagaatgggatgtcatcacagttaccaatggagttactcttgcttctttgggaatatctaatattttaatatcatttaaatagacagatatgctcacagatttatgcctccaaccacaactcagcaatattggtgcaactgtcatgcagcattcccatttgaatgctatatctcctctcagatttggcatttccagaagctagtccctgttcttgcctgtgagcctgccctgtcccaagtcaccatccacaactggtaatgccatccttcccaatactatcctttagggttatctttggctccccatcccaaccttcctcaaataccatattcaattcaccctggcaccctgattggacctggaagtaggtgaagagtctgagtacttgccaccaatttcattcctactgatagatccaaagaaccaccatgttttctgtggctaccagccttcttgattctcaagtctagatttagcttgttttcacaaacaatgttcccaaacatgaatgagatcatgtcaaccttttgcataaatctacgacatcatccaattggctcaaaaccaaagtttggctaccaggtactaagcagtcaggttcctgtgatctcgttgaccccagtgtaccaagcactgtcctgtaccttgtgtccctcacattccctttattgtgttaggatttatacttgctgggttccctctatctagaatgttcttcttataagtagatgtttgatttctaccaaacccttctgcctttgctcaaaataacaactttcagcaaggctatctttaaaaacatcagattgtttttttatgaaagggttataaacaaacttttatttataatacacaaacagaaaagggcatttataataaatgtttaatttgttaaacattaatcatcatcacaacactcccatgtatccatggtacaaattaagaaatagaacattattggtaccataaaaatccttacttattttctaagtcagagaattggcatggtttctgaatcatctttggaaattttacattccacaatattaaactcctcttatctataaagtttgtatatcacctctttttttctttttggtactttggatctttttttttaagggttattttatgtatatgagtacctatttctctctctaaacacaccagaagagggaatctgatctcattaaagatggttgtgagtcaccactatgtggtttctgggaattgaactcaggaagagcagtcagtcagtgggccatctcttcaactctgtactttggctcttaacctaagaccttgtacatataggccatctgccatgcctgtgtggttttctttttcctttctttttccttccttccttccttccttccttccttccttccttccttccttccttccttcctttcttccctctttccctccttccctccttctccctctctctgtctctgtctctgtctctgtctctgtctctgtctctctctctctctctcttttgttgttgtctgtctatctgtctgtctgtctgtttttgagatagggtcttactatataatttaggttagtatagcctaaaactcatgatcttctgcttctactttctgagtgctaagattacaggatgtgccagcatccccaacaggacactatctattaaggggcaattgataattcaattgcttctctgggaaattgtaggacaatcaagaagaaactaagtctagaacattttctggggctctgctggcttcttagagagcagatatctcatgtctctctgttctctaggaaagatgtagatattcttctctccctagggtaataagatttccatgtggtaacatagtagaatttaatttaaaaaatttccatcactctggcccgtacaatccatacacacaggtctccttcattctcttggctttgtccatttgtcaactcttccaagatggtattttttcttgtttatttctcttttccttcattaaatggaggtactgggaagccagagctacttgcagggacctttgtaaatacatcttgaatgcattgatgtatgaatgtatggatgtatggatggatgaatgaatgaatgaatgaatgaatgaatggatttcagcttagcctagccagtctgtgttttagatagctgggtgtggggcccagactaacagggacttacaatttggtatgatttgggttctgaaatgtcttcctctgctactgtatgtggttcattggcccaattaaagagcttcctctcagcgtagaagcttgagatgcaaagctttctaatcttggcaaggcttgcaaagaagctgcttagatttggttagaaaccatcttgactgccagaaaatatagtcactgtgttgtttaaattcacaaatcaaaataaacaccctgaaattgcagtacatttactaaatctcagtatcccatttgggccaacaccatcatgtatccttttttcttttccttcctactttagtctctctagatcagaggcctcgccacaagatgttgccccctccagcatcaccatctctgcccacgatctctcatacccaacttaaagttgaatagcttccatgcaaactatttcaagtaaagagagaaggaagccatgagctattaacagggattccattcccctatggccttggtaatttctagaacattgaattaaagagttctcagacctttacaaattctcaaggcaaacattattagcaaagagaaggccgtgcagcatgtaagaagattgccagaaaatgtcactggaacttctgaataaaatcaagaagattcagctcgctctccatcttcctctaccccctccctctaacacgattagaaagttatttcatgtgtcttatgtgctcggtcagtcaaaggcaaacctacatgattgatggtgacagggaacacatttaactcattactctttactttgcagcaaaatgatttgtgtaaactgtctgcctagcattaaaggtaaaacaaacttagaaaccccaaaatgttatattttcatctaatattttccttttggttttatagctgtaatcgcatatggattcttttatttagctcttggcatcgacggaacaaaggggaaggcagggcagaaagattacataacacacactgagtccatgctcagagagtgtggagccacaaaagccacaacagtcaagacttaatgtgacaacccaggagaaactgtggctctctctggcccctatcatctgccaggatgttgtcactgatatgaaatgaagactgtctccttgatcaagcctgttgatattaaactgggccttttcagaaactattaacagattgcatatgttcctatgtgcacctagacaccacaggcttcacctggcttccatgttcttccagctgcctcctcctctcctcctcttcctgttctttctcctcctcctccttccacatcactgtaataattcaagcaagaaacacagaatataacttcagattcacttaactctgctgcttagtagtacagccataccatgcaaagcagtgaggaagagtttcaaactttccggcaactactctgcttgcaggagtacagacccaggagttgccattgaatcaatatgatgggtattttgtcttggactttagattatgtgaatccgctcagttttcatagcccttttggggttgtaagttttacatttttttctttaattatctattttctttcttttttggtttttaaatatgtttgtgtgtgcatctgatggtctgtgtttttaactacatgcatacagtgcctgcagaggctagttagacaaaggagggtattagatctcctggagttggccttacaagtagttgtgaacttcccaatatgggtgctagaaatggccctttgcaagagcatcgagtgcttttaaactctgagcaagccatccctctaggcaaggcaaacatttttattgaaattaatttttatttgaccagagaataagtatgctttttttaatgcacctggaaattttcataagggcaaagaagctacgatctctgaccaaaacaaaatgaatggcatctgtcattctttgagagcaagaagttactaaagattcttattttggcctgtccaggtggttggggattggtagagccagtttaccacacgatgctagctcatggctctatctactggtatatactgctttctcaacttcaaacacttcaaactttcatatacattgatatcaatagcttctaaaaacagaacctactttgtaatctttgcaaaggtagtaccctagattttctatcaacttggtcaaagtattgcagtataaaaactgaaatagttttccaagccagagagacagtatagcatttaagagaacatgctgctcttacagaggacgtggattcagtttctagcacctatatgaggcagctcagaacttgtctgtacctccagtatcagggtatcagataccctctgtgggcactacacttggatgtgtatgtacaggctggcatgcatgcacccacacacatacacacataaatacaacttcaaaataaggtaggaaactcctgttcttcccccttttctatgtgatccttagtgtgaaaatgacccaggaatgtatgttttctgagattatgacaccttctcatatcaaatgattttctgcttaagtcaagtgctttaaccaaatacagaaggagtttggtaatatgcttttttagagggtgaggtgaaaggaagattaaatagcccagtcttgaccatctaaagggagggtgagggcatcagagtgcagtagaggaggtttccagcacattgaagatgtcagagaaggggaagccagagccagagggctaagtagtgtaacaaaagcaaaaagagtattttctagaagaaaatatacatccaaccttaatcctctccaacctcttgtgatcatagaaaaaatgaattcaagtgactcaaacaatttgcggtgtagagggtaaagctgtgaaataaataaaaatctgcttgctaaatccagcatttctctggctgttcttaatccttaagttgtggtcccaggaaggttcaagaatgactgttcccatccacatccagtgccacatattttaacacatacgcgtagggccatatatcacctcactatagaataaagaatagtttccaagccctacattccctctaagccctctgagggtctgggctccattctctttcactatagttccatgttttctggtgagtcttatggaactactagcaataagcttcttttctttcagagtcttttttttttttttttttttgtaaagctccccctatgttgttgcagatatcaagactccattccttctgactactggatgatatggcatttttatggctgtaccaaaatttgttcatcagttcattcatgaaacaggcacagcaattagctgcttctagtttcttgagtgtggtggtgggaggggtcaataaaagttgtaataaatatgtgtatggaagcttgtgtgaataaatacatagaagtaggattgctgttttataaggacaaatttctgtttaactgtaaaagaaactgccaaaccattactctgagtgcctatacaatttatatcccctcaaactgtgagcccaagtcaatgtcttcttttaaaagttgtcttagccaggatttttgtcccagccatgagaaaactaatacagatacggactcagcctactatagtttgggccatggttcatttaaaagtgtgttgcttcatttccactgtggagtcagaagagcccgcccacattttttccagattttcgaatatttgtataggcatactgagctatcttggtggtaagattcaaaccacaccacggaattcacttacattcactatgtattttacacatatgccccaaaggcatacagttctcaaaggattctgcacatgaaagagtttcagggaggaaggttttctttttttttttccttgggatgtcatgtcagtggtacaaatttttcagaatttggagcacgttggagttctttggactaggggtacttaatctgggaacatttctactattgatggacttactgcttcctgaggaaatttcatctccatttattcttgttaattttgttttgaagactacttcagatatttgtttctataggttctaaaccttttatttgcagtgttttgttaagaaaatgtctaccccctctgctgaagtattcccttacccctcaaatgcatagctgttcccttttggtctcatttgaatgcaacgatgtcattaaattctaagttatttccttttataccctcccataggtaggtcagttttaaaagtctactctatgaatttttgttaatccatgggttgtattaatctgttttattatgacttagaaaaatcaatttatttggatttgttctcactattttattgattgcattatgattgattactgtgtcttcatgttcttctctactcttttatttgaggttatttggacactgtcttgaaagttatttcattaattgattggttaatgcagtttataaacgtgaggctgtatacccactttcaatatttgtgcacataaacattacccatcttatgtcttcattatatagatgagccctgcaattattagtgtctgcttttattctagaatattagtgctgtattttatctgtggtgtttctctagctaacctaggctattaacatttacctagtcacatgtaatataaaagctttatcagtctgaccccttatgatctcctaaagggagaaagaaagatggtgctgtactgtgctacatgttacatacttggtgatgttatatggtcaaatgcagccgtttgtattcatgccaatgcttatgctctgtgtttctgaattctgctggtggcccgactctcctgttatttctgtcctgccagctttgacagtgagttcccttggagcctttcctggaagccagcactgtcctccttggcctgagaggggattaggtcagcctcattctggacaacattttttgtggagatagaattctgggataacagttcttctcttctaaccttttaaaaacccgttcttgctttctttgtcatgagaaaaccctttctcctctgaatccatgttagcaccttcaggtagctttctctggatcccattaggggagggggtctgcttcttttctccaggtttctgttgtctttctaaggagcttgggttggcattgttcttctgggtccatcctgctggagtttactgcgacagctgaaatgttagctttgtcttttggtgaaactgggttttagttgtgttctttcctgtaccaccccaccactctgttctcctaggatacccaggccatgaatgaggaatcttttgttttctttctttttttcttttcctcttttttcttttcttttccttttttttcttttccttttattccttcttcctttctttcttccataagactcaaactttctagatgaattttttaaatgccttttttttctgtttgaattttttatatactttttctattgcccaaatcacacagtttaagtttttagtatttaaattaattgattctttcctctatcttcattctgttgaatctatttaatatttagtgacaatgtttttcaattctaaattttccatttgattctttattaacatttatttgtttgcttgttcatttattcattcattaatgtgtgtgcatgcacatctgtgaatgcaagcaaagatccagacatgactggatcttttaaagtcttagcgtctagttgaggttgatttaggctgctcatgcttcctagacttctttgcattgtgaattccagtttttctctttaaagtcttagatattctgtttgaattagtcctgtatcagcctcaggctgaatgatggtttaattctcaaagtcagtatccgctgtgaagagtaggttcttcctagacacaaggtagggtgaacctgggagttcataaattgttctatgaggctgttttctcaagatccttctctttgatctctgcaatggtatttgattccatcagtcctttcttgatgctctagccaggaaaaaatgaaattttttggatatttcactttgttgtagactttctacatccatggctgtatttggggttgcctagtagaaagagagagacaaaaagcaacagggcttgacattctctttcctgggaccaaggtcccatgacagactctcctacctcctttaaccttcttctggttcacattgtcacacctgctactgttccctttgggtgtcctgggctcaggacagaaaaagaagtagctggaaagaatgaacaaaccattctcatttaccccattcttttcaagtataaatcattcccttttctgttcccagagccagcatgaatacttctagagctttctctgtccacagtattgtagctactttcagatatcgaattgacttgagatcagactagaggctatcaggggaagcaatggcaaatgcactgttggttttgtgatttttctaaaacaaagagaacattgcctcttttgcattgccatcaatactacctattgtagtgtgacaataatcattctctttggaggaacccttttacttatccacctttggctagaggctgggaatatcaaagcttgataagcttgggaggagccaggcagtggtggcgcacgcctttaatcccagtgcttgggaggcagagacaggtggatttctgagttcaaggccagcctggtctacagagtgagttccaggatagccagagttatatatagaaaccctgcctggggagggggggtgcttgggagggtatgttccatagctaattcctgttgtatcatctgcttccttgtcagctatgcagtgaacttctccatagtatgtttcttccactattgagtcctatctgtacacacagaaccaagcaaataagggttgaaccccagaaaccataagccaaacctctcttagtttgtttctattgggtatttggttacagtgatggggggggggcagcatgcagagtgactactaagacctccctcttatttagcagattcagtgggcacagaggcatggtccttctcaaagaggtaaaaccaacctgtctataaggatatggaaaaaaataaaaagtagtatttctaactcaagcaattaattccatccacttcctatctcctattgtatacagacttcagtcctcatgataggacaacagtatctctgtgaacttgaaacaccaaccaaggggattgcattgctcatgttgtcatgaaatatatgtggtagttaatggtaaaaactacaaacaaacaaacaaacaaacaattccccagttgaaagattttatggagtgtcatttttcaagatgctgtatggatacttaaattgacctcaacacctttttactgatgtctcaacatttctcgtactcatccaaatgggtttgcagttaaaatagccatctcacagggttctaccaggaactatcttgttgacacttgtccagaagaagcttgtcaagttttgatgtctatagccaatggcaaagcatggatgaattcaagggttcctccaaaagaatgattattgacatgctagatggtaatgcaaagaggcaaagttctctttgttttacatgtgcagggcaagcaagaacagttcgtaaagagccaggcgagttcctagttttgggtgaaatctagggaacacagtgtacctgaactaaatgtgacaataagttctggacagaatgctttaagcagctatgtcaagactctgaacagcacataagagcaaggaggctaaggaataagactatagtaggaaataccaccaagccaatgatgtgtttaccatggcttccctggaatcctctgggctgatctgaaggcaattcaaaccctgagggtacagactaccactgacatacctcttcacagctcaatgttctgacaaccttccaaaacatcctcaacagcagggatctaggagttcattaacataagaccagggtgatatttcacaccatcaactggtactgtgcacaagtctgtgcgtattcttagcttccatgtttgttgcatttgtctttaggacaatgggtccactccttttcatttccttttgttttcatttccttaggggtttagtgcttttctctccttattcagataacatttatttgccaataagaaggccagttccattacatatgggtattttccttttccctatattagattagcaaggaaagacctaagcaaaggaagaggcttggtacctctttcagaatggaattaggtatccagcctaactgtgattgaaacggatcatccatgggtctcagtgcttatatatctgtttttctatgcatctatctatctatctatctatctatctatctatctatctatagatcaggttggtatccaagccatagcccactgccttcctatgaacttgtggagtgtgggccttttggatgttgtacactggtcaagcagataggcaaggtgggaaaggtggccagaccagtttaggatgtgatttttttcctgtgaggttttgagagccttgttctgtttctaatctttacctgcccagcaaaataaaaggagaagcttaaggttagtggaaaattaacaatacataaaaactcttaatgactggtccataaactctgtccttcttgggagcaggtagcggcaagccctgtttagacttgaccttgcaatgagactaaagattaaggttagtgttgagtcactgctgagagaagataacaaacaaaacctgatagctaactatgctgcaaggtagcatgaaacatctctacctataatgtttacaatcttatgttgccaccatttttgtagctgactggtattgagtgaggttccttaaactctttgtgggaagaaacagacttgaagaattttctgattgagtgcatcttctcagccagtagcatggctcatcagcctaaaaggttccagttcttcaaatcccttaacgtttctgtcagcccccaacctcctcaagggttcatgtgtattaatctgtgtattaatttggtaaaaacaaggcgtgtctgttggccttcctccaggtctctgaaccagtggagatttgctgagtgtcctttcctccatgttaataagaacctatccagcaggtgcagctgctgtatgttcagttcaacatacagggaaagtaggaatatgttggaatgagccacttccccaagagtcagagagataggtgtgatcgccaactccctaccccatcactggagtgcagtatccacttgaacttgctcatgagtccagtgagtcttggggataaaaccaacccttcttgccataaggatcatcatgagctctccctatcatctcatggaatgccaactgcaggaaggaggccagtatggcagttttctaggcatattaaactgtaacatgggctaaaaccctctagaaatgacacaaggggggagaaaaatatactcctcagaagtttcttaggaggcatatcatttgtggttagatggaagtaaactagggtgggagggttgagtcttctttctccaaggggcatgtagcaatagatatgttctcccttgctttctaggagtctcgagttggctaccctgcaaaccttagctgagaagagaaggcaaagcaagtccaatattgacttacctgaacaggagaggctgaagttgcaaaaccagagttggttttgaaatttcatttatttttaactttacgtagtatttagcctctcctcaaagtgcagccagtcatgcatttaataaaataatagtgtttgcagacgcaggctatagttaaagcgatgagtacctggttctaatccctagaatcaagtataaaaggaacctggaagctagagtgatggctcagcatttcagagcactgattgctcttccagaggacctgggttcaaaacccagcatctgcatgatggctcaaaactgtctgtaactccagtcctggaggtccaatgccctcttctagctttcttgggcactgcacactcacagtacaaagacatatttgcaggcagtatatatgtggaaggagtgggtgtgggggtaggcacatgctagcacatgttttgcaaccacatctctgggggaagtggagacattggggcttggtggccagccagtctagatgcttggtgagatccaagccaatgagagaccatgtctcaaaaaaaatgtaggtagcatctgagtaacaatgtccaaggttatccccttgtgtatacatgcatgtacacacatttatgagtacctaccaacctatctacatacaagcatacatacatacatacatacatacatacatacatgtgcaacatacatacacagggacatacccatacccacagtgtttgggaatttgctgatttattagcattccagtcatgtgaggtgaagagttgctgggtttcagttcaacatgagtccaggaaaaaaagctagatgtaaaggttaaggcctctgtatagagaaatgagagacaaaaatggagcagaggaagcacctattgagaataagggcaagcatcataactaagcccagattcattctatttcattctggccatcaaggacttgttaggtccaggtttcctttggacgcctaggttggccttccctagttaatgttcatagcagagaaggctaggttaggccatcttcatcatcttagtaggactgtgcacacactgtctcctgttttgggagactttcatctttttctaactcccttttcaacatcatttgtgctcagggtgattaggaacatctatggagaattggaagtacctctgcagagttctaatgtgtttctctttaatccagagtcaatgatcagtgctattccagccattcctagcagcagctaagtaatggaaagttatgaatcataggcccagcatctcactggcttacattcatttgaacactagaaacatcttcataatcctatcactaccagtatcactgtcattactattactcatcacccgcagtggccactgacatttatagaacatctataaagtgacactcaataaatgacacagtatgactattccacatgcatttgccaggccctgtggttctatatgtatcacctcgtttgaactatcttcatagaagcaagcattagtgctacctcatttttcaggtaagcaaggttatgctgtttggctgagggtcaacgaggctgggattcaaagccagcgttttcccaggcttagctacgtcctgcttctattactccaaccagtgggtactcagaattgtggctatcctgctcccaaaagaaaattgctaagcctagctaaatatctcagtaatttgtataatgccacttccactctctgaatcagatggctttgtgatgtggctggaaacccgctctaggaagctgcatagtagtcacttctaacttcctgtgaaaatattctctaactggcaagagattgtccagataacaatgcgtatacaataaaccagcaactctgcctttgatacctggctcacaaataacccatttggcttcccaatcaccctgatgcctaaaaccagctcaatttatgcttgaggcagcaatggctctgttcagccagaaagcaaaactttacgaccaaaccctttgctctgaaatgaaatctagtctctttggctcgactttattaggccatattgtacagcgataggagacataagtatccagaatctgctgtcactaaaatgggactgggttggcaagcatcttcgtcctcacagtcaacactgtgtcctaaaatgggaaagttgaatagaaattagggatgcaaatcagggccattttctgaaactttatttttaattgaattaaatatagacatctatattgctattgaatctgtgcagcaaatacagatggagactgagctattagtgaggtcatcggatcaatggccagagactaactagatgaatctggaccctggaaatagtgtttagactaattaccacaacaacaacccaaacacttggaggcccatcttgtgcctgattatgtacaagcttcctccataactgcctccaattgtactttatggccataatttttcctgtctttaactcagaccctttaggctgccatgggatttctctaatccctagttcacaaaggcatagagattcctggttccttgttcttcactgcctatgggaataacactttgccatttaacgtgtggtctttatgttttagcatcgtccaggagtttccctcagggctgtggcatttgtagctacattctatcaagtctccttgagcaatactcatgcatatcaaagtttaggaggtactggacttggtgggaggttatctttgaggctatttgaaataaaatagcaggtgtacccattgctaagaaattgttgttaatggcagtggactttcatcaatgtgtctaaattactaaaagatttctcaaagatctaggcagcacattaaatttctgtgtcaccaaaagcaagcttacaggattggggaaatttctcattcaatagagtgatttacacataagcatgaagacctaagttgtaatttccagcactcatgttaaataaatagctacacaaacataaatacagtcaggtatggccatgagcacttgtaatctcagtgatgaaggtgtgaatataagatccttggagctcactggccagtcagcctagctaaattgatgagtaccaggctcagggagagatcttgactcaaaaaatagggtggagactgacatagagaatacacatgttaccaacagtctctgagctccacatgcacagcacacaccatgcctatctgcaggtgtacaggcacatgtgcaccaatagcatgtagataacatacaaacacacagaagtaagaccataattccaattcaagtgttctagctaactcctccttcgacaagtcattgttgttttaaagatacaaggaggggagagcacactcgttttcagaacttaggagtaatgatattgccaaataaagtttcctctaggcttggtctgtgctattgattactgcttgagttgaccttgcaatctgaacatcgagaaggtaaagaggaggatagtcccctaggactgggcaaggagaccaggacttccctccaaagggatgacgtgggacgcagaaggatggagagttaaagcacctgttcttgagcctgccttctctcaacccaagcctctaaactactctatcttaggatttagaaaaccataagttacctgttgtacaatgttgtacaatgacaacattccccagaaaataattgctcatggtaagaagtttcctgggaagtttcacaattacctccttgctagagcccaagactgtaggtttttttttttttttttttttttcagcatcaagagaccaaaagttggttcatttcatgttccaacactaaacgatacaaagttatccatgctcacttatgcttagatgcctggaaaaattgtgcctgctgctctctgtctctgtctctgcttttctcaggcttacatcaactcagcacatgctgaccgagcacttccaagttgcagactagcatgctgcttgtcctactaataaaaggcagggttaatgagacagtcttttccccatggaaggagctggctaacaagggagagctttgtgctcctattacatttcatggctgttcaggtcagatatctgatggatcacatgatctgagagtaaatgatgccagctagtatagctttagtacctgctatgtgccagataccaccctatgcattggatatagactgtctagtacttgtggcttgcttggacatggtaagtgaatatccatgaaagcaggtaaaatgcattagaccatggacgtgtaagaaatcaggtagcattaaattcaaagggaaaggtagaagactggtgatgaaaaatagctgtggagagatgtgtagttctaatagaagactgaaggaatcagtcatgccagggtgggaagctgagctaagaagcatttagcttagcatttcccatctccatggcctactctgtgaatcagagggtcctatgactgtaggtaacatctctccctttgagatttatagttcacattagtagttaaatatgctaagaaacattttgctaaaaccacaaaagtttgaaatttaattaaaaagttattttgtattattaaatccagcactccacatttttttaatccactcaaaaatatcaccatactctaactacacacaatgcccagttccaggtagtaaagactcagaatataaagactcatcaaaagtgcctacattcttgttgggtatagcataaaattttctcaccgttcaccttagtttcaggtaacaccttgtaggaagttctgtccagttcaccttgtaatctatctcagctgaaggtaatgctccttcattttgaaacctgagggaagttgtgtgtggtacctaaagatcctaagataggagagggaaatgttataggcaatggagtttcagacacagcccacagtccatggacaagtgctgtgagatgtttgcagctcactcggcaggagagaagacacagaaaatgaaatgagaatctggaaactttttgagggatggattttatgttagttggacccagtgacttaagattttggccccatgcttgcttcgttttaccttctcatttctttcctattgtaattcacttttactcaaaatttcaaacatttgggtctaaaaaaaataacatgtcagaaataaaacaaagccctgcttccttccagtcaaatgtgttgagaatggctccttggaaaattctaggtttccaggcctaactggggttaattggggttaaggctggggatggtggggtgggggaggcagcaattcctgggaatgtttacttcctgctccgctaccccagttagagggattttaggtgctattttaagaatattatcatttggagcagaagtgaagatgctatgaactgttagcaagaatgtaaaaccaaattcctacttgggcagatggtgaataggccaacttttaaaacagttttacatgtcttaaacaaaagtaccttttctatattggagaggaatacaagagagaaggaaaaccctacttaccaggaacggtaccagcatcctatcacagagataatagtatcttaaataatttcttcatagttattgttttgaaaaagttctatgtcgccatttctgttaaacattcttttacttcaaaccctttgacacttcatgctgcttcagaaacagtctgtgctgaggtgagaaaatagggggaaacaacatgtattgaaatgcatttgtgtgtggtgtggtctgttcagttttctctgaatatcttatatgggctgattacttttctccataatgattaacaacaacaaaaatatcaaaaaccttactttatctgggaataaaaaataatctggcctaaatcttcctcaaattaatctttggggttgtatatatttactcatttgaggtcaaagcaactacttacctggcattccatcaaatctcaaatatgtgttttaatttgcttccttcagcctttggaaaaaacctgagatttttttcattctgtctcctcattctgaaaatcatgccctgaaataaaccatgaaaatggaatgccaaattgtgataaagaccctgaaatccagcatcacttccagaaagcctgctgaccctatcaccatccaaggagtatggcactgataggacatctgaccagaaaggaagaacattccagaaagacaaatgttgggaattggttttaatgctttgtattattttgggtcccaaaagccacgtttcgagacctgagggtctctgctccagcctggcttagattgataataaagacttgctgttcagccattggctgggcagggagaaaggtcgggactttgagattgctcgggtaaggaacaaagagggcaggggctggggaagaagagaattgccatgacttggagggagaaggatcatatttaagagctgtaggagagaaagcttcctacaatgtaggtggaaagggaaagtggccatatagaagtgggaagggctgcctagaagataacagggcagcaaagataaaatatagatttagaaggtgttaagccaggaataccagagggaaatgtgtgctagccacagtgaggtttagaaatgcccaatcattgagctaatcaaggcatatcaaaattagctgacctgtgtttgtgttttatttgtgactccagagaacttttgggtgggtgcagtgcacatatgtgttttaactaattcgccacaacaggcaaatcatcgtttgcctctgcttcaccccccccccccccccgggctctcacttttcctcctgcttatttaccctacaaagctgcacaggcagccattttgtgagtcggcaccctgtggtcctaagcactattctctcatttggctttttaattctgtgagttgctttaaggatctgtaattgtgctggagcaagaatggtgtagatgaaatatccacatgtccctttgatcaacactgggatatgttcatgggctatgaacacagagggaaacagaggagaggagaatggaactctagtgatggggtcctgttaacatgacaacattgttgttttcagttagaattgagagcatacagaactccatcaagcattccccagggacagcactctgttgaggaatgagtataaatgactccactcattttagtaataactccacacgcaagttagccaagagcccataaattctgatttcatgtttattgttgtaataaaatgtttgacatgttctgtgggtgctatttcttttatgtcaggataaatatgtttttaggggatctaagatagtgttggtcagttcatgtcactacgttgttgtagaataccacactgtaaaatgacagggatagcatactatgtaatttctgtgtgcaagtatttatttatatgtaaataacttttttggatatatatttctatggtataaaatgacattttgccagggaaggagtattcactgagaattcagatagactttggcaaagaataagtagagacttagttcaccacccctaccaccccgtgggggccaatattagtgtgtagatgttacagcttatcccatcttattgcagcaatgaggataataagcatcagtctctatgattctttttcggttctttatttttaggtatataaaatagcatctatttgaattaatgcagtacacttacatccaattaaataaggatgggtgtttgataaccttcagggtcatttgtatggctcctgaagtagggatggagtttttgcaaaatcatttggctctaatctactcagttattcactggcaatagaaatcactatggctgttacaaacccagccaggagggctgaattgttcacattcaccaggctgttagcattagagaaacacagttttctttctaatcaggggaagcacaaaaaataaaagctgtcgttctcagcctatcattagtaacacatgcaaaacctgggatcaggaaggagtgagtttgcagagagccaaggctcatgactatggatggaaggtacattgatggcaaggctgtctgcccatgggttggtgtaaaaccatttgcttgggaggttcaactagactggttgaaaaattagatcgtgaagggtagataaataaaaccataagaggtgtagacaagctagcctagtggctcattctcttttctcaccgaaggttctgtgcatgtttgatgaataagtacccacagcacatcacctgctcatcttgctaggagctcttgtgagacacctggcatttgatgtgacagccaggggataaattgctgcctcaggaaaagctttgcctttgactgattgctgaatggttggaaaattaattttggcacctttccttaagtcattttggtcctattccttcatttttctgctgggaaatgtgtcttcacattacagttaaaaaatacattgacaatacaaatgtggggcacagcatgtactatttatggaaagaagttgtaggctgggacagtgctacttcatataatagaaaggatgagttttgctctgcactccccttgcagctgagctcaatatcagtggctctccttgctggctactcacactaaggagttcactgctgatctcctgagtctttgatgaaggactagtttgctgttcccgcactgagcacttgtatataacaaaccctctctgtccatatacaacctctctgggcacctaccacgttatcactgagcaagagatacttgtgttgggcagttaagggcatgaactctaaataatgtttgtgcaactcactgtctttgtgactgactttaactaggtgtgtctcaggatgacaaaggatgcctcaactctctccaaattgctttatgctctctctctctctctctctgtgtgtgtgtgtgtgttaaaattcaacacctattttacattaacatctcttcttttgtggtggttccactgacaaaggtaagagggatgtgaattttcattcacatgccttgttcacatacttaacttaggaaaccaaaccatgataaaatgtcaagatctaagccctgatacaggtcaggaagagtgaatttccatttccctagattgcggtatggtccaatgtcatagcataatgtagtcagatattagcagaactgtatgtcacggagaccagctggactcttccaccttactcagcagcttagaaaaccagaaattgtaactttaattattgattcaaggaatatggtctgagtttgggatgtagcacagttggtcgagtgcttacacagtagtgttccatcttcagcacccatagcccaataaactgggtatgatgatacattcctatcatcctagcacttgggaggtagaggaaggaaggtcagaagtttaagttcaaggtcatccttagtttcatagcaaactcaagatagtttggagctctttaagaccagtctcaaattgtaacaaatgggatctaagtttgattttggggtgccttctgacatgatgttctcacctgccatcaagtcagaggaggcattctggtaaaagacaaggctgcatacttactatgcattctgtacaagttaacccacatggtcctgccaatcacatgagcagaagaaagctctttagaaacagcatgtagccttcctaagatgcagatgaacacaatggttcccttggtctttattagcccttggcttttgagggtgctctctaatatctacttgttctttgcatagcacccagttgtctcctctgaattctttaaatggagatttcaaggccagaggagtcaaggagaggcaagaatgagatcctgatgccaaacagtgctggttcctaaccctggctcttgtgataggattcccttcttcatgttctttctttagcatggtttgacatcatcgtgtttaggacaattagcatcatttataatcagaagcacataactcattggcatgaagtacatttacatggctatgtaactgataccaccacccatcttcagaattcttctcatcttgaaaaattgactcgttgtgccataaaagcaatgactttccctaacctcaccagtgccctttgcaccatccacttccgtgaatttcagacatgaatctcaagtaactgggcccccccaccaatctttgtcttttgtgactgtggtctgttttagcatatgtggtgaaggtttatccatagtgtagtatgtgccagaacttcctttcttgagaaggctaaccagcatgcctttgtgggtctgcacatccttctatagacactttggtattttcagacctaataatgctattctgaccccttctcattttctctagttatgtattcaggactggaattgctgcttgtataagcaatcatatttggaatccaagaactgtttcactgtttcccatagtggctgtactagtttacattcctactaaatgtatgtctttttggaaagatattagtataattaaattagcagttttatagtgtgtgagtatatatatatgtgtgcctatgtgtgtaatgccttgattagaaatcttaaaaaacattgtaggctgtgcatgtgcaaatcactccaaagatatgaaagtcttaaatagtcaggacaatgaattttaaactccttacaatttgtacagttgatttgatgctattgtgttcagcattgtagacaccatctgagaatttacatacagatatggaagagggattcttgttttatagaatgttttgaacgtttttctcagttgtttggctttcagtccacaaacactgcacatttgccacagagacaaacctttggggaaagaggcaaggagaatcaatgagagacagatgcatctagtaggatggctgcttatatcctagccaggaaacatatcaggaagaatgtgggaaaataaacacaagtttaaaattagatctagtcagcctctagaataagtcttaaaatatagaacatattcagtaaatatttactgagagaataaatcaatgaaatatttttgctaagtttaacaaaagcataacaatattattattatataaagaaactgtttctatttacttaccaaatttactgactaactgttaattcattattcacagaagcatccaaccaattttaataattaagcgatcaatatgaaacccatattatttggacattaccagtaatgttaagataaagtttatattgtcagtatgtttggaaatcacttgtaatatttaaattagaaaaaaatgtctgttatattaatagagagctgtacaagcacaagccagacaaagtcccagcatgaagacaggaggtgggcacaaagatgcatccctagctaaggggatattgacaattaatagctgttggaagagggaatatcagttttcattaatgtatggctacctgatagttcaactaccaggtgcaggtactaccaggtgaaaatcctggtaggtcaatcatcctccagtagatgaacacacatccaagaatatatgggccacacaaatgggacttgatgagttttaaaaaagaaaaaaaaaaagaagaaacaaaggtaggaagggggggggtagatctggtaagacttgtagaaggggcttgactatggtaaaattatattacatgaaattctccaagaactgataaaatgtattaaataacaaaaaatgctttaacaaaaaaaatgtttctttaaaaaaaataggtagaactcttatacctttaggtaaactattttttccacaaagctctgcgtagctaacacctgacatacagaggcagacagaagcagctccttccaaggagggtaacttatgatctcaggctgagcatgaagcccatgagggagggggcatcccattcacttcctgagtttttattctggatttgatggcctgagtataaccacatggttgaagcctctgctctttctcaggctccccacatctcctccacacccggatgtttcagttctctcagttaactgagggatcagtcatggtcaggattcctcacagcataagaagagaacaacaaactgttaagagctacttcctgtggctagaacagcttcctgttgtcatcttattacttaagccatcacaggaagtgaagcctgggaagctatagggcagagccagccaaggcggtcacagactcctcaatgcagagtgattcaggcttgttgtctaatttaagagtttccaaagattgagtgcaatgaaatcactgcttggagacagttattgggaaacccagatagaccttattatttagaaaaaaataaaaacatgctttttaatgaagttttgggcatgactcctttgaaactatattttgcttattgtgatattcttagtagggtgagaaaaaaaatgtttccccaaagtaggaatatgtagattaaatgtaatacatagtgtgtgggcatgtgtgcgtgcacatgtgcatgcatgtgtgtaaaagtcttcagacaatacattatctattttaaaaactagtatcctgccactcaaaaatagttgctactgatctgctataaatacttctagactttttcatacagccctataaatataaaagcagatataacttttaaaaataaaatcacctcggggcagacgaccatgcagttaagagcacttgctgcctttctatacaacttgagttcagttctcagtacccacactgtctggctccagcagatctgataccttcttctggcctccattggtacccatgtccatgtggcattcacgccctctcacatacatatacagaaaaaaccaaactaataaacaaataaaacagataaaaatgtcattataatctctcattgattctaaaatttcacatgacctgtgcttatttatgatatatcatgaatcaaaaacgtatgtttatgtgcttatgatgtagaaacaagtttcaagagtggcacaaacctacaactccatctttagcttacctgttaaaataatttgtttccttacaatagatatgtgaaaatgggaaacctgcataaaagagtatatggttctatgaattttgaaaatgcctgcaaaattgttctccagaaatttgtatcagttaacacaaatttgttcattgtagatgggttccccatacccttagccttagaaatcatgcagggtcacagcaaagcaaggacttagagacctctcttggtcattaaaagtgtttgctacacaatcttgaggacaagaatttggatctaaggctcacaaaaggtgtgtagtcttcaaatgcctataactccagcactgcagtatccaataccatcttctacacaaagaccaatgtacacacatgcctttactctcacacagacacagacagaaagacacacatagtcacacatacacaagcacatgcacataaacaatcaaacatatgcatatacacacatgtccatactctcacacagacacagacaaagacatagacacacatacacacatgcccatactctcacacagacacagacagagacatagacacacatacacacatgcccatactctcacacagacacacagagaaagtcacacacagtcacacatacacacaaacacacacatacacaaacaaaacaaacatacacatatagacacatgtccatattctcacacagacagagacagaaggacacacacatacccatatatactatgtatatactctcacatagacagatacacacacagtcacacacacacacacatatccaatctctcacccagatgcagacacacataaacacagtctcacacacacacatacacatatccatattctcacaaagacacagaaagaaacacagtctctctctctctctctctctctctctctctctctcacacacacacacacacacacacagagtcacacacagagccacacacatgtaattaattttttttaaagcaatgcagtgttttgagggaaatctacctgaattcaattatttttggggtccctgggagcttccggtgggtgctgtggagatgtcgccagctgctgaggttgtcaccaggaaggtcattgtgtcactattgcatttgtctctttaactaagactgtaactggagccccccctctgtcagagcttgtctatactttaaaccctcttcctgtgcacttttctcttagattgaggaagacacatggcagaaatactacttggaaggagtctccaatgaaatgtacacagaatatctctccagtgccttcgtgggtctgtccttccctactgtttgtgagtaagtgaccattcactggatattaatttgcacctcccacctctgcgcacactggtcaggacacttgacactcgttcaggggtccttgtgggttcagtcctgcatgtctgtgaacaacaatgcatgttctgataaggttcctgcctttgggttttgtgctggatccagttcatcccctaggtctgaaaatcttgatgtgaaatctgatttatacaaacttacaatgtgtgcaatttgcctgcacatcttaagtaacgcctttgaaaggtggcacaaactcatgtggccctggttttgctttgtttcatttcatctatatctgtctgtctgtggtactaggcattgaacccagggcctcacactcaatccctatctatctgcctttaatagagaaataaagcaaatcttgtcagttccaggataaatgaattttatcctctaataaagtccttctaatcaagtctgtagacatttaaagcactttggctatttactgaggaactatgctctcaagtgcgcaggaggaggcctggaaaaggtctttttcagcacgtctgtactcaaatagtaagaacctgaaatggtccccagggcacctgcagcaggacataccccgtagccctggaagaacaagcatcctggtccccagtgttctaggtgcccaccttgaggcatgatgggaccccagatttaccacttagcatctctggattgaagtaaaatcaaaaaaggaacaaggtgtgtgttccccatgaaaacagaaactctgaaagtggtggacctctaagcctgacccactaggacctgaccccttagcaaaagtcaataaatgctctcagtgataaaagctggcaagaaacagatggatctgagctgcaggagaagagccacagctttaagccggcaatttaccagccaagcctaccctctgggattctagaatgggaagtctaaaagtgctaaatcaaacctgagagcccttcatagtaaaggaaagttaggggctttgggactcttgttctgttctctatgcagaagggagggatggagattcctgtcagagaacacagcaggtgttctctgccaatccctgagcccaaacccccaagcactccaaaatggtttggttgtttacagaaatttctcaccctgtctctaagcgatagtttaaatgctaaatggactggaaaagtgagcaggtaattgattctctttcggaaggagcgcttttgtggaaatggaagccctactgtaactcccctgagcaccctccctgggaatgacttcccttcctgccacagggtgaagttaagcttctggagatgctgggaggctgccctcctttgtaactcagcctgcttccaatgggaagtctggagaagtcagagcttccaatgaaaacagaagaagctggctttttaagaaggctcttgaagtcctctatggtcaagacaggggtggtctgaccatcagggccaaattggcagcacccagagcgggggccctataatgtcagggatttgagctgggaagtttcaaagctctcttagccattaattttcctaattttttttttttttttgaaacagggtttctctgtatagccctggctgtcctggaactcactttgtagaccaggctagcctcgaactcagaaatctgcctgcctctgcctcccaagtgctgggatcaaaggcgtgcgtcaccacagctgatttaactagtatggagcctgacaggaaagctccagtgaagtcacttccagcctttccactttctctcttcctttactcctggggagaggggatggaagtctttttttttttttttttttttttttctttaactagaggcaaggacttcagcccctatactaatggtgcactgaacctgtggatttggcatggtttcatttgttcaaggctagttaccagtatttctgaaccataaaaacaacaaaccaaaccaaaacctgagtactttctttaaaatccgagttggccacagagtccatgtttctgcacaataccaacgggctcccacttgttttagtgaaagggctggatatgctttctcataaacaaggatggagtgacctgagctacccaggtcaaccccatctgcttgcagccttgggcgtctccactagccttctatgactacttgggagtctgcagtcatgcagaggctgtgtagcccagttccagcttctaggaggagcagttctcaccgttagtcgtcagaagagttgactttttccaggtgtggggaggaagaggaaggtaggaagctaaaagctccaaggcagcttccttgggagcacgagagtcaggcataacaccagtaagatatgaattatttcccttgatcgatactcatctttagagtgtgttctaatgagggaaaagctattttagacctaccttgttgtcagagaatttagtatttgttcagtaaagtgtcgggatgggaagaaaaaaaaaaaaaacagcttccgatgtgagtgagaatgtgttcggcttagtgctattattcctgtaatgcagcaattcggcagaggtggaagtgatcaataaagaaaggacatttaatgagatttaggaacaacccaaaacattgaagctctcttcaagcatttgattatcttgaggcttaattatctgtgttttctactttaaattaaagaaaagccataactcaaagttaccagcagtttaatgataacactcttcaattcgggttaattaaagcgcagccgtaattagagtgtagtgttgtatatcaccaggctgccgcgtaagtattttcattactgtaagaattggctattcaatttcaagatgacataaaggacgcccaaatatattttaagccggtttgtggagacggaaaagaatcggggaatattccgggtataataaagcacagataaaatatacagattttcagagtggtttccataattatgtaccacactaaaacaatatgcaaccaatgatgttgcaaagcatggaaagaaataaatttcctcttcccctaggctggcagcatgccacctagcaggtggtattggtgctcaagagaacccggagttttctcaaaagctagatagagtcgtcctacaaaaggagaaggggccggtagcaggtgaaattgaaggtcgtctctgaagaaaacagaaagggtggggacagtgcaggggaggcagaggcccccaaaactcacttcttcaaaatttcaagctgaggggtctccagggtgcaggattagatcccagacacagtggcagccctttgattctaccttatgtgtgaccaaaaggcaggacatcgatcccaagccagatgctcatttagacaaaatgcacgatcttacctaacctacccctgcattgtctcaaacaatgaagtgaggtttattctgaaagggctaggggtgtcagagtaatataaacacctcacgttgtacacaagaggtcccttagcttcaaacatggagactcagatgacctctggacacctttccaaaaccacttggaaaacaaaggacagaacaacagaaccagggttttgaggctcctccagtctcgtgcaactaggaacaggttagagtaggtgacagtcgaaggctggctcattaatgctttcctgggaaacttataaaatgatatccacacttcagctccagatgttaaaatctggagtaaggctttaaagtgcgcactaatgatttatttttaaatgaacaagtgaggtgacccttagctgaaatctgaggatgggaagctgctccgtcctccccacaccccaccccatcccaccctctgtcctgcagcctctgcagcctgctttgagccccagtacttaggcaaatcagagaatcacgggtggatttgcgtcttgcaagcttatgttaagatgtgggcctttgggagctagagagctaggctgagggtgcttgctgctcttgcagaaggtcagagttcagttctcagtgctctctctagcagctcacaaccacctgtaagtccagcacctgggggtcaactgccctcttcttcttggtgggtttctatatactagcaaaaacgtaagtttgaaaaaaagatcagagcttttgcatcaacttcctcttcagcatcacctttgagatctaaaataccaacaaccacctgcttctcccctccttttccagcaagggcgtgtaaaaatgcaaatgaccagtctcaagcctccagcaaggttagagtactgaagctgcatttaaccttaaacagtcttattctttgagcaatatgacactgtccaacatattgaaagaagtgacaaagaactgaagtccggccctcaggtcagccacttgctgagttaagattctctgcactttttctgtggtagcaccagatgtctggccttagatgtggtgcatgtggtgagattcctcgtgttccccatgtcttagtacttattactcatcttccctttcggtctgccttccccaaccccattctcatcaactataagcaggcaggcaggcaggcaggcaggcaggcaggcaggcaggaagaaggaaggaagagaggggagagggaagaagggaaggaaagggaaaagaagagggaaaaaagggaaaagggaaaaagggaaaagggaaaagaaaaagggaaagggaagggcaaaaagggaaagggaaaaagggggaaaaagggaaaaagggaaaaaagggaataaaaggaaaaaaagggggaaagggggaaacaagggaagaagggaaaaaagggaaagggaaagggaaagaaggaaagggaagggatagacatgttggcagttcctgtttcttttacttttattgtttagtaaaattctccagttattattagtcacaaatcaatagaacagaaatgtgatgaattagaatattttcaccactgcatcaactttgttttcttagatttgattaactattaaacatggaaacttgatgacaattcttttgaacacgaagtaaagaatttgtttcccagttagtgccgtcttcagagtttgaacttgggttgagggagcccatgcccgtactcagggagcactaacaccttcacgtgctggtaaacgcatacaactggtgttagggctctcaaggcttcctatacaccgaggaaacaagagatgatgccgttttatagagctggtcctgaaagaagcttaggttcagatgttgggaaagtccccagggaatagagaagctgggcctcacagcaccataggcagtttttgcaacacacatgttcctttgaggttttctgataataaccctgtagatgggggagagaggcacattgcctagcgtttgacatgtgatgctttgggaggcaatagtggtagtagtttcattgtgagagttagtaaaggtgaggatgctcaggtaggtgggggtgggagaaggtgggcaggatgacctgatagaaagcaggctcagcaattgggttgccaagaacacagagttccaggtctggagtctcacagcgagcctactaatcagtcattcatcacttgcaaaatataaaagcttaattgtatgaggttttacagctcagaggggattaggacaagagatgtgtttaaaatacgatgtgtctctctgtctctctgcagctgatggagcagttaaaattcagctttgatgctgggcagttagtgcttgagcaacttggggaaatgcagtgggctgtgctgcagggcagttcagcccccaattctggctgcaaaatgtggatgctactatattggtttcaggcaatgaagaagattctggggagggggaactctccattttctcatttatccacctgctttccatatgcctggaattgagaaaattggactctctgtgtcatcttgtatgggacagatttttcaaaagaagccacatgaagaaagtcaaaattggtacagcataggtaaagaaaggcctcttgcccagtgtcaacttgagttctataattccattggttgttttaaaaagatctaatctcagtgtgaaacagagaccagacaaacccacttgttccagggtaaactcacgtagcctaacttcagaaaaatttgtgccaacagaacttaggtaaaaacttaaatcttgccttaaaaattttttcctgtcagagatggtgctacccagccgcctatgttgggaattttgtaaattgggttgtaaatggttgtagatgtgagtgtgacactggtgactacttcggctacaggaactgaggaggtggcagctagttctttctgaaccatgagataaaccactggcaatcaacacccccccacacacaccccgaaaccctcgtgcaaggttgtagaggctaataatggtttggaattctggagagaggcatcaggcaaagaatctagttggaactgattttccctggtagctgagtgtgcagtgtaagcccacagcctgtggtgtgtgtttcagaggaagaaggacagtaaaactttccccaaagtgcatttgttagcactttagaaaagctctaactgttcacatcaaagaattaaagtattttcaagtttaaatgtcttaggtctgttagggaagacaggcactgtgcttggtgtgtgcacgaatgcatgtgtgtgttcatgtgtgtgtgcgtgtgtgtgcctgtgtgctgggcatggatagacatgcctgtatttgagagtaggtatgttctgaaaactgtcccatccatccttatcaaaattacaaagaaatggagtctaatatctccactaacagtccaaaattactattttctttgtgctcagtattacaaatcttgctgtttaaaaaaatatattttaagtatatcttcttttctccagaagccatcctttccaattaaagttaaatgtggttattttctactctggccccttattttccaggacacagtgtttgtaccacttccgtggtgattatggaagttatactgaggttcctgggcctctgagtagctggaggggagctggtgctcatagggggagctgggtttagaaggctcggtgggtttagatagtttagaagctgctctttctttttttctgacactttccgggtggcagtcctttgctctaagccccatctttgtctccagtttgtaagcatactggaaagtgcaaactccatgacaggtttctatgcttaattcacaccagcaagtaatctttgcagtcaaggggactgatttaatggcagggacaatttatttctctctgggtagttagagacagctggactctaattcttgagagcctttgttcaggaacatctgggttgaaaatactatagttaacagatgatgctggtaataaaagaaagggggctttgtataatggcatagtcaaatttggtagacctcaacttaataattataagggaagcaatctaacttgttattacaacagttttattgcagatttctggtttaagacctttttgtgacaagtggcattttcccctcttggaggaaaaagggggggtcatttttatttccctgtagtttttgcaaccagtgacaacttcccactctggacatattgggagacttcgttttagaaactaagaattaaactcttgctaacttacagctggctttatcttatttattatgctgtgaagcctttttggattttttttctcattctttccccagccctgattggttttctcaattctacacaagttctatatacatggaaatacagcgagctgagaaagggggaggaatagagatacctgtttaatcaatatttaaactatagatgcatgcagaggcagacatcaataaagatggaaagggaaggcagtctgagtagtaggaaggggtgggcactgtgggacactggagaaagtgaaccccctgaggagtcccttttagctccatgaaggatggctccagtgtgaccatatttggtttgccaaggaaagctgagaaaccagttttatgaaatcacatgttgatgtctatttccagtatttgaaggaatactgtgctggccaaatagtgtgggccagttgcacttttggcttcctctgctcatccgaggatcagcagcaccccacaccacatggagactgaggctccacttacctttctaaatgcaaaagccatttgaccttgagcctgtggattttccctcctcagacttcagtttgtcttctatagaaggaggctctggtcttctggagggcctcggtttgatctccagcactcacgtagcagctcgtaaccatctgtaactcagtgcacaagactgcctgcattggattcacttacgaagggatacaatctacttttgatcttagctaaaatgctgtaaagcaaccgaatgcacacatagcagcgaacctttcccgtcccaacaggaggattaagtctgtacaaacaatgaagaacttggatcccatgaactaccagactccaagataaaaatgacagtggtcccatggtctctgctgagatcactttcttactgaatttttttttatttttatttttggatactgtttagattcatccagtaattttcttcaacaaacagtgaataaagaatatgacttattaaaacagtttaaacttcaggaagagcagctctacaaggagttaatggagtgctatggaacataaactaagaagaccatttccttgctatagttggtgatacttgggtcggtggttcagaactgttctgcacaactacctcaaggtctaggtctagcagaccagtagcaggaatcagccttaaaattgcagggagagcccagatacactgtacggaagtgttcctctaaagcctgattgtcaaaagcaatattaaggagctaggacctctcatgtaagaaaaaacagttgatcttattttctaaagagaatatgaggtactcacccttcacccgtacctttcttgcaagctacacatctctatgcctagcagatcttactaagtcattttttcaaagatttatttgttatatataagtacaccatagctgtcttcagatacaccagaagaagacatcagatttcattatagatggttgtcagccatcatgtggttgctaggatttgaactcagaacccctggaaaagcagtcagtgctcttaactgctgagccatctctccagcccaagtcaattcttcattgtagactaactacagggaatgagatggtttagttggtaaagtgcacattgcaagcatgaagacccaagttcaatcctcagcatctgtgtgaaagccaggtttgctctctatgcatttgcaatcctaacgctgggacggcctgaacaggaagattcctgaatctcaccaaccagacagttgggcagaattggtgatcttcacctccaactgagagaccttgtctcaaaaaacaatatatgagaagcagtcctcaagcagacctctggcctccacaatgtgcacatgcaccccttacacacacatatatctgcacataagtcaaatcaactccatgtctttcttttactgagaataagcaacatataccttgaaggggccttttacccaccttgttttctgacccactcatgatttgtcttgccttgttctttcaatgacagctttataggctctgtatctgattatcaaatattcagaccatttccctgcctcaggacttttgttcttgccatttctaccccacacttgaccccagagatccctttcccaaaccttctcattcccatctcatctctggtgctctctgcatcttcagggtggtcctcttaaacccatttcctagttagtctttattctcacaagtcaaaacaatttctacatttgtcatggcctagaaatttattattgattcacatatatattggcttataattgttctttcccgatgaaaaacacacttcactggagaggaagatgtatcttcctcctagggtcagccagaggcctagtacttaaccatggcatggactgtgtgggtgttctaggtcttagctttagcagcagtcaaacagaactattgatgaagggtagtatccccagcttaggaaggtgtggagaagtcagtagagccatcaaggaaggccttaccctttgacctaataactctttccatttactgtgctgagccagggctcacttgtcattatcactgagtaatggttcattatttaaaacctcctaaaatataccataatgcttattatagaaatatgggatgcataatatatatggttcattttttagttcatgtgagcccttatctctttaaatagccaatgcacacctcaatctaaatcataatatatgaattcaggtttatatttttttctttgtggccttaacatcttaaaacaattttcaaaattcatttattaaaacttttctactccacatgaataagactactttgaatctttttctgcacaagcatgctatgacagctccttttattttcttggagttgagacactgtgagtagaattcatctccgtaaggagttcctctctgttagtgtctccattcaccatgcactgtggagaaactccaaacgtcttgaagatgtttctgtggctgaggagagaatgttcagatatgcacaactatgagaagcagccacagccagtgtaaacttagctaggagctaaaagatttgcatctaggaaaggagctagagatgttttggaaataaatctgaaaaggaagcaatagtcagaatactggttggaggatagacaagatatgacctgggaagatggttggcaagaaaagagaagaggaaatattggggggcagaaggggtacaagagtgaagccagagaggcaggaacaagcctgcaggaaacagtctggtctgcagcccagaactgtgggcagatgaggtgagacagcttggatagagccaggagtgacaaagctgtagtcatgtgctgggcacttagacggaggctaagtattattaccatcattccaagcacacaggggtctgctctgaacaacaatataggccatttgtacaaaagaccgaaatggaatccaaataacaggttgcactgctccaagtctcccttcccccgcccccgccatagttaacattttactacccaactgagtaactaatgaatctggcgggtgtaaatccccagacacaaatctctgcttggggtctgtgtctagacatccagaccagagcccaatttgcacttatcacttgtggggaatcaggtttaatgggggatatggggaggtgtcattttactggccctgcctttggcacctggcggtagactgaggatcccctggataatgaccgtgttaggggactggaagttcctaggtaagtttggtatatggctctgctatcaggaagtactgactgggaggcctttccttctcattgcaggctgtgttttgtgaagcttaagctcctgatgatagccattgagtacaagtctgccaacagagagagccggtaagttgctgttcgagttggaagtgtatatcctgggaaggtccgtccatgttctctttcttgaatatgatttatttgtttggaacccaactcagcagctccctgaccctgcaaaacatttcaagacatggcaggctctgtcattccatgtcccagtgggcatccagagacaattaccctggagaagaggaggagaggagagagacattctcagtagctctacccactatgctatgccttctatccatgaaagcaggagcagattccctcttgaagccccttttactgctgtaagcaaaaagcaggtggcctctggccttccttacaagcagcctgcagtagagctgtgatgggaggtgccagctccctcaatagccaaattgcaagcatcctattgtgtaccatatgtgtttctcccaccgcagcccatatccaggtggcagaatatcagcttcatgtaaattagccaggagaggagagctctgaggcaggagctctcgttatttatttatttttccgttaatgatgtgcaaatcagactgatgagggacggggtctggctgaaacagataccaccccagtcgatacatgaccttactgctggttgatggcagcactgtatgaacaaggaatccagtcgaggggtcctacatgcagtattgataacataggtgatctttgatccttgactcttagtcatagttttggaagaaagagagctggttgatagatagagtggcttttgttctctgaaatgacgcatccaggtcctgtctatgctctagtgaggcctttgctcctccatgttcacaagggcagagggcagcccaccccaacacacaccttcataactgaacacaatatagggcaacacttgctaggtcatgctagcatcgtttaaggagttttcatgatcttgatgaatgaccatacacacacacacacaaacacacacacaagcccatttctaagtgtgtatctgtgaccaaaacaaaacaaaacaaacactagatcacaagtaagtggatactatgttgtctcttccctgtaagatcagattgtccaaggtcaatctgatcgaatgctgcattcctctggaaaatccaaatcaaccagacaacggaagataaaatggtagatttggtggccatgtgtagaacatggtggcagcaattttaaaattacatgtatggaaaggatatgtttttcttttccatgttggcaaaggaaataatattacagtattgtttgagcacgagagaagtccagccacttgtctttcaacagttaaagtataattttctggggtcactctttgctcctctttattcctggcttcacctggacccatgtttgtggaggagaaattatgggtccttgctttttttttttttttttttttttggttttctgttcttttgagcgggtgagcatcaccaatggtaatctttgtggtgccaagtcagtacacttttgtggatatgagtgttttctctatatcacttttatccatccctttcaaagcataagtaaataaaaataaagaaaagtgtcaccacataggtgatgctaatgccaacaagtgttttcagagccttctggaataatctatggcaagagaagactgcaccaagccacgagcatcagcccatcagcttgtacataacttctctctggacacaggaaaagaaagggcactgctggaatccaggcactgttctaggaaaacagattccaggttctatgaagaaacaatctgccctctgataggccttcttattgggtggtaacctgagctattttcaacaaagccatgtgtagtgaaataggttgtaggttttgtttttctcccactgcctcagaaaagacaaaaacaaacaaacaaacaaaccccaggaacttgtttggctttgtattggctttctgtgtgtagttgccagcattaatcctcaatgtggcttggtctcagtgtggaagcacaggagtgcttgtgggaaaaggtgtgctggagggaatgtggatcagacgctgccccactaaacctaggactcatccaacaaaacattttaagtcccaaaccacactttttctctatccttgtgagaaacctaatcttgttcctttccaattttgtaatggaccagataagacaatgtagagaggcctcatctcttccccaccctcctacctctgacctgtgttaaaggacattctctgttgttggttccacccatgatactgttttcatgctttgctgataaaccttgttttcacacacatccttcaaatgctttgaaacaaaggttttattccttccttcttcctggtgtcagtcaatttattatcaaattgtttgatttgaaattcttttcttgtcgtttttgcagaagccgaaagcggtatgcattcttcgttaactttccttccaatctccaccctatgtcttcactcctaaccacaggactaaccatttgccaagaactcaagaagagagagattatatatgtgtatatatataatctccttcccttgtctagtatatatatatagtatatctatacatatacataatatatatatacatatatatatatcacctgtctccaactagaatacatcaaagtagcctgctgttgtcattgtttgatttgttgattattttggttgatgcactaacttctttgcaggaaaataaaaataaataaataagcaagcaaacaaacaaataagtaaattaatggaaaagcagagtcctatcttcaatcatagtaccaatggtggtaacaaatcccattacagttgaaaaggaggacagttctctccagccctctgtgtctgttatctgtattgtcctgatgttgtcctggcgtccattagatacaggcatcattttgtgttcattgcatatccacattcccagtgacctccacgtctctctgttgagttttcactttgtagatcagagtttctgtcctttatccacaaaacagagaccaagcccttgcacttcttcctctccttgtattcgtttgggttaattttgttttgactatctaacatcttgagcagtgccaataataaactgcctagctattatgtttatgttctataataagcatgtttgttgggacaaactcatgggtttctttttttccttgtgtgtttgggcatctttcttaacaggaagtatctaagcttttaccatgtgacttcatcctgttttgccgctgttttgtgttgcatggagcatgactaaattatcatcgatggcattttaaaaaattatttgggttcaggggtgattggtgttgttacattttttttttcagcatagtttttcaataatgcaatctcttagacagtgcggctgaaagtgcaatgccaacctgttcacgttcttctctgtggtggtagtcgctgtcatgtgtttgtgttcatacttgtgtgtgtgtatgtgcgcctgtgtgtgcctgtgtgtgtgcctgtgtgtttgtgttgtttggcactctttccaatgtcagatcttctgtgattttattttgtagtagatgtgaatagaggtggcttcctgtcagtttggtattattgacatgatccaactgcaagaagttattgcaacactatgcatcttcaaaggtccacagtggttgcacctctgctgttggcttttggccttgggtccttttactttgtggttaaggcatgttgtgatgtaggcatgacttgtcttaaagtgtaccagaaagtatggcttgctcccagaaccacatatccagtattatccttcctagatcagctctctctattctctctcatgaagttagtcttttttgtaacacaaaacaatatattgaaatttaagatgattgatagacactcaggctaaaccagatcttgccaatattgttgtagaccacagtgatggctatttgagtttggcctactgggagcaaccttgattatggtgtctctgtatgtaaatggactagacctatgcatattgaagcatggaatacacaaactgtgtcttctacacatattctaatggaaatgcatgtgtctagttgtgtgggactccaacagcacttattgtaaagcccagaagaaatggaaaattcaagagaggtgataaggtttgagatttgttttgttttttattttcctaagatatgttataatacagcacaaactgcattgcagttgaacttcctgagagaggacacaaattggtccaaatgaagttcctgctgacagtaattgtatatgcccatgagtgatcacatagatatcttcccagtggtgtgattcttctggacatagcatggactgaactcctcaatggcttggatttgcttactctgtttaatgaagtcccattagcttgctagacacaactaggattacagtgttttcaagtataaactataccctcacggaagttgtgatattttcttaattgtttggggaatggtacacgatgccttgagggggtggggggttgggacataggcatacttgtacacacacacacacacacacatacacacacacacacacacacacacacgcctatttatccatggtggattacagtctcctttaatgtatctattttagttaaattaccaatcattggtcatctcctcaaatagtaaggtttaggaagatttaaggaaggacaactaaatactctacagccattgcaccttaaatattagagagaggaaaaagaagatttctccctagcctagtcaagattttccaaactaccccaaattcaagcatgggatagccaatgaaatagattgcaaggtagtgtctgccttaggaccctgttacagatatctgctgttgagtagagcccattccatgtcgatgtgttctgcaatcagaaacatgggtttcagttctaagtaagttgcgctttcagtatggaaaccaattgctccagctgcctaagtgactcactgtttacatttgcatattcgcatatttatacttcatagcttggtggtcaatccacaagaacttgtggtcgctcctttgatcagcctgactgatgagaactacagtttgggtttttaaaagaacaaagttgctgctttcatttacttgagaggaaaggagaaactttgagaactgcagccaatgactatgacataggcttttcattcattctatagctctggaaagtaccaatagtatgtaggaatctaagctctactatgagaaactcacaaataaatagagggatcctgtttctcagtcttccaatcaacagtggttccttataccttatagaaagtgtatgttttgctcttaaagaggatattatacaaaaactaagcctagctgcagaactagaaaagcaatgagggaaaacttttggagaagggatgatacaagccctgagtggccatctgtcactaggcattttcaattaaaatcagcaaggtcatggtaaaaagaggataatttatacctttcttaaaatgaggaaatgtcttctcctgccaagatgtccttgttggaattttgttaatggatatatgggaaaggaagcctcttgataggaccctgctcttagagacacatcttgagttttatctctgataagctcatgacttagaccaaattggagccagagaactgattgaaaatgatgtttggggaggaggagttttggcatcccctaataacaaaataaacttgacattgaataacccccagagctcccagggactaaaccactaacacatggtaggactcatggctccagctgcatatgtagcagaggatggcctagttgaacatcagtgggagaagagacccttggtcctgtgaaggctctatgccccagtgtaggggaaagccagggccaggaagctagagtgggtggattagtgagcatggggagggggaagagaatggggtggggaggttttcataggtcaatagcaaactctaagtcttttcattgggggaagaaaatgttattcttgcctagaattcttatctacgtttccaagaagggggcagggctaaaattttatttaaatgttttagattttgaatgtagataacagttatgacatctgcaatgctaaactcaggaatgtatgtctccgaagagtctttgaagcttacagcctacacagaaaatgtctcatgttgtagacccctgggatcacaggcctgctcctcactacccttagaactaagtctagcctatctggcacaacgttccttgtgattgcggacttcttccatttacctcaggggctggcctcattcttttgaatctttcagctccccaagactatctcagcctaatacttcatacagatataactttaatcttctcagtctgtccatagggaacatgagggaattctggggacagtgagccatctatctcttgcacatcactgtaaaactcaagaaatgggagtgactctgtgtgtaccaaagttaatttacagtagccactttccagatgttgtgcagagaccacatgttcacaagaggtcaattaacatcgaagacaaaatggcgagcaggctggtaaagctgtaacagcttgtttactctcactttttaatcaccggctgatatttatagaaaccaaagattaagggcatattgtatccttaacacataagcatatgcctttattctcttagaaacattgacacccaggggttatatattgcatttcctggattaggagagtgaggcttagctgcctccaaatgaccagaggcagaccccaatggtttctggatgtacgcaccttagtacttcactaacaatgctagagcctgagacttgaatgcccggtgacctccagcaccaagcaagccctctccagagcactgattcagttaaaaggcatttgaagaccacaatacattccgttgacgtgcattctctagacttcaaatcccgggatggcactgacctgcattctctagactgccaattcctggatgtcacactatagaccaattcttgctcagtgtacatgaagatcgaaggaaataaaaaagaaacctctcttgatgggaaccttgagatcactgcatctcacaaaagcactgtgggctgcattgatggggtacagataatggggcacaaagcattagggaaggaaacagaggtctttgcgtatacatgtcaccaatacaacgcctgtcacattttatctttcagattccattgttcaaatcatgataggaccccacccacctacccacccaaaacctgggaagtcttctcccatgcttatgtgaattcttagcaaaaggaagacttccttaacttttaagaatatactttcaaggctccagaagtgtgtggaattttttaaatagatgaactcatgtgttattctgtcacgtacagtttttttttgaaaaaaaaaaagttataacttcatctcacaggttattattattatttttttaataagaaacacagtgttccagtctatcaagccaggagacctctgatgaaacacaatagacctgggcacttttgaaagaataaaatgataacaataaccataaatgaaaagtattgagtcattttaacattacttagttctttgaccaaacactattgttagcgttaccactccttttgtggggaagaacattatgctctaggttcagggactggcccaaagttaccacctgcatactagaacatggaccctacttctgatttcagaggcaatcacataggatctgcctttcaggaaagtgggacgaaaatgtacatctaaaatgccttatttaactgacttgaaagggaaatcaatataaactgtatagtctcacatacgctttgaggaacacaaatacaatttttttcatatgtatttatcggtaaaaaaaaacttgaataatctcaaacttcatcccctcatgattgtgctaaatcagagggcttgtgatataaaagtgggggttagcagaggggtaattcattataaggtcttattgtaaaacctctgccttttgcagtgtatcattagtgcagactgctgggccattagagtaagcttatggttcctatttcagaaggcatctcattgctgctcgggattctggggtagagcagtgaactcttcacactctgctattattattgttaataacagcaatggcacaagccctgttttctgctatcaggtcttgttacagctaatggtggatgctcctgcaaccacaacagtgattttggcagtaatgatctgatcgcagttctcccaacagaacagcagttttcctgagtcctccttgttttgctgcagatagaggactcctttggcaacagtggtttttttttttttcttccctagaatggtcttaccactagacaaagatcacatgttaattaccatccttcattttgctttgggtagctagggaattttttagcttgagcccaaatatctctttccctaatcaccagcttttcagatcaaaggctattgccattgtcttttgcttcaagttgctaaattcaacatctgccaagctcaaagcctgcttaagacagtctagtgctctgcttttgatctacaggaactggtttgcttctctcatttgctaggttaggatgcatttgtcattactgctatcccaaacctaacttgctcagctaatcaatttctggtactaggagggcagtgtatatttcatttcattcccctccctgcaagacaaggtagttgttttggttcttttttccttttttttaagaggtaatttttatttgtctttaaaacaccgagtgacccaatgaaggaatgccacctttatatcttattcacacaacccatacagttttataaaagcagactgaagtagttgaggctatccaacagaaggtagctttctttataactgtatatagatcgggttctttatgcagtctactttgatgtccttatcagggttccaaaagatgtatagtttccttctacattatatataatataggtgtcttgtaccattccccatggaaatatgtggtatgtatatttgtctgtttctgcatccatataggggtcccatcaatgctatattacctaagggagaatgggtgtgtgtagagcttcattaggctgacagtgtttcaatactggccatcaaaatcagtttcagaatggggtacattctggagaactgtgcttctggtcaggggtatctgggggcagctaaacaactctgttaaacaaacccagaccctaaggcccagatctgctttgattttcctgacttggagtgtatcacctggagctaaaggatgccatgattgaactagatgtctgggccagtaaagatcagtcactcagaaaacaaagctgggtggcagggggtggtggtgtggggggagcattagactagtggggcccctatgaaaacagcagggtggtgttatcatcaaggttttatcctgaacatgagctcatacttgtgtcttctttgtttgtttctgttcacggagcagaatattaattaaccctgggaaccaccttaagatccaagaaggtactttaggatttttcatcgcaagtgatgccaaagaagttaaaaggtaagagtttattttcatctacttttctttctggtccagccaggcaccttgatgtaccaaccccctcgtgttcatatgtccagaactattgaagccccttccttgagcaatctcttcacatagccagtatctgtctttaaatttgaatattaaagttttagaatcaggaaacctagttacctgctctcttgtcttacaaggaaggtacctgaagcccgtagaacataagtgacttcaagtcattcagattctgacgaggattcatgagacatctggcctcttgtctgaggttattttcttaataccatctgggtaaaatatctctgaatattacaaattttctcctgtaagtgccgagtagaattcccaacagtttggattaatttctgatggaacattaaacttcccctatttgtgtttgcaactttctaagcagtggctaaaattgtcagccttaatcatgaagcatctatgggttcaatgtgaggctcaatgttttatgaaatttttattagtgtctttattcctgtctaagcagcttagggaatcatagggctttgcatttcagtatggactatcattatatgtgattccactctgcccatttgaaatgttcactttcagagacaagtaagccaagcaggttactctgtcaaacaactgtgctgctcctatctgctaagccatctctccagcccttcaagtttcttctttatcttggcttggtttaccagcctatgcaaagtaatagtattatcaaaaaacaataggatgtatttgcaaactcttgttgtgccagtatagagcaatgatatttgacaaagccaggcttatgaatttctttcttcctattcaactgtagtgaatggggccatactagtttaaaaagcttacaaggaaaagagcacatggggttgagggctttattttttccatctgagatctctaataagtttactcctgcaaattggaggatgattgacattgctaaattatatgggagaaacacatctctaaccatttcatggatagaatatcctgagacaggagtttatcaggactatcctagatggaagtttgggtgagaatggaaagtggggtgtctgagagagccccagccccagggggtctggaatagttatgtccttgtccagacatggggcacagaagcctgaagcagcatctctgccctaagcatggtaagcagggagcacagctgaccatacatcatgcacacctcccaaacagcaaattcaacctgagctcccatttgtgtaattctatttcctattgcgtctctcgctaatgaatgtcacaaataccaggcagcccgggaaacaaattacctcctatattagggaatgtaatatgtctcgtttctgtgctttatggtgttcacaaatacatgctgacaccatcagctacaactccagcctgtaattttccatggtgtgcgatgtgtcagagcaaatgttgtcagttagggggatttcaaatagatgaagaatatagaaaacttcagagaggacattggaaatttgaataaaactaaacaagttttattttttttttaaaaagtgaagtagattatgttgatttcttattgggtcttcaccctctgctatggctgaagaaacaagactacagcagcaacaacacacacacacatatacacacacgcacacacacactcaagaagttagtggaatctgggtcatgaagactttgaggtacaaggcttagagaaagaggagtgaacccatgtaatcccatgaggatgctactctgggatgagtatttatttgttcatatgcttttaatttgctattcctaaatatttgtctttttaaataactttggaacacaatctggtgtctctcttaccttctttagcagatacatattttgtttgagtcataattaaaaataattgattagttgccaagttaaaagaaattgtctgcttttatattaacatttttagtcctagttacttctgaaaacatgaaataccccaacctgggagtcattctcaaactcactctctcactcactcactcatccattcactcactcatccattcactcactcatccattcactcactcactcacttacccattcattcattcactcactcactcactcacttactcactcagtcactcattcattcatccattcactcatttactcactcactcagccactcactcattcatccattcactcacttactcactcatccattcactcactcactcaagtgtagggagatgctggcagattgtggaggtagagtcatgtgactccatttggattagtctggggaacatgtagtatgtaatcatgaactttgtagaaatgaaggaggagtaggaatcacagctgaagcctagacatgggccatgaaccatgagagcagcagagatgatgattcctcttgctgagatgggaaacaccagaggatcatggaggtggtaggaaatgacttctgtctgggccacagcaaatggaaggttggtcccaaacataccatggagtcatgataaaggcaggtacatccaagagtctgcagttcaggagaaaagagagctgtagatatcaatatggagccacattgataggggttcctggcaaggagcagatgacccacttaagtggaaaacaagggcaaaggtttataaagggggtcgtataaacttgtggacagcaagatgattaaaaccagtgagagacagcaaagcatcttacaggcagctacaggatggagctgcagggagaagggacaaaggtttggtggtggaagcctgggggtgggggtggggagaagaggacatggtgtgggtgtagtgactactcactgctttgctctccaatggagaaatgcttctgctgcttgctatctattccacaacccactaaagagcaacctcatcctttccctcttccagtcacctctgactcttaccaagcagaactcttgtccacagcagaacagaggacaaggagaccctaaggccagcttagcaggatctggagggggtctttctgttggtgtgtaagctgttgggatgaagaggatgggagttgttttggagtgagaagatgagcagcaggaggagagaggagacaccaggaatggggaaaggctcctggaatcaatattcacggattttaactgggacctgtgggattttgtttctgggatctctgagtttacaaggacaagtgtgtagctctactggaagggtattgccaagagaatgtggtggaggcttccatgagtgaggcagctcccaaagaacggtcactcggcaaaactcaacttgaggcttgaagaatcttcctctttaatctgaagaatccatggacacctttagctcattactcgtctccctcattagcctcacctgtctgactgaagcagctatttggctaagtgaaagaagccaggcagagaaagacaaacactacacaatcacactttatatgtgaaaccttataaagtcaagtccacagaagcacagggtagactggtcagttccaaaaagcaggggtacagacacctcaggggataagggtcaagggacagaaaacattaatttaagcaagaagataaatgcaagacatcattgcagagtgccatggccatagttggtttaaaatagttatttttgcatttacttatttatttgtgttgaatagatgtgagaatttgctcaccttgaaggaaggtgagaagacagcttttctccttctgccacatgggacccagggatcaaactcaagttgtcagatttggcatcaactgctgtttcctgctgagtcaactccctggcccataggttgttgttgttgtttttgagacaatgtattgtgttcatgaaaattgcttttagcaatttttcttttcaggtagattttaaaggctctcacctcacatacaaagtaacaactagatgagagaaaatgtgtagccttgcttgatttagccactctgtaacagaatttcaaaacagcacattgtacatcccaaatatacatagttgtgtcagttaaaagtaaaatgtttaatataaagtgttgggttttagtttctttagactcatctctccatctcttcagaggaacacattcaagatttttggcgtctggacttgaatctagattctgccatttagcagtatgaccttgaacaggccatttaatctctccctgcttcagtttccttatctgtaaaacagaggtaataattaagcctctttcaaagggttgtttaaagatcaaatatgttagtgcttctgaaatactgagagcagcacctggcctagagtccggaccctgtaagagttagctgttattactgctgtattgctgtcactcaggagagcttcgaatggaaagaagatggccagaggaagtagattcaaacttacttgccctgagtaagaggatgcagcattgcagtgccttgtagggcaacagctgtcctttctgattttgcagagtatatgccatctgacattggaaggaattgtgaaggagcctcttgaaacaaagagctttgggcttgctgtagaaatgcacaccctgtggaaaacataaaagacctagaattgtgtttatttctttagcctccattgagaaatggccctgtttattcctggcactcagtttcatgttgggagtggtaaaggcgttaagcccaggattttgttagttcctggatccagagggttggaaggttgttccagcgaattttattacctccccagtacagatgcttctctacttatgatgggtttacatcccaataaaccatcataatttgaaaatagctcacgccaaaactgcatgtaacctcctgaacatcacaccttatcccagactggctaatgtattcaagtgcttcaaattagcctataattgggcagaaccgtttaacacaaagcattgttaatatacttacagaatgttgagtatcttctgtcacctattgactcttgtgttgaaagttaataactgagcggttttatggccctgcttctgcaccatctcaagtggaagggcacaagccaaccgccaggtccccaggttactcctctgggtactattgctgagaagtgctcagagcatcttagttcttctcatccaaagtatctttggtacaaccaaagttcacattgaagtctcagattgacactaaagtcagattaggggacattgtcattgttgttgaatgcttcttcttccagcccattcaacccaacctttcctctccttatcccattccagtggtcagcataaagagaacaaaacttttatccattatatatgctcagagcaagctataatggaatggatctagtcagctttggaatgcaatgggctttgaatcttaggagagagttgacaggaaccactgcactctttgtttctgtagtccctccttccctccagtgactctcaagcctttcttattttagttaataagaaacggtgctttcgaagtgataaaggtagtatttatgtctgactgagggtcatcatccttgagccccttaatatatattcaactagacggttgggatttcagagttgtttttaaagtacactccaaagactcagagatggttgaccatgtgttccaaggaccagtactcagtgctgttctcagaaacaacagtcacagacccagtatgtgacatcagcaggacctttctccccatttctttgcaaagtttataaaaagaagcaccaactccaatcacagaatcctgggtttgaaatgagtggtcttacaacaaacatttccgtctgcagatgtctaaacttttcaaaagatgaaaggaaattagggctggcatgtttcattaatttggcaccacctcgagggaaacgtggtactcattttactcgggtggattatgagatgtgtcagtttttccattctctttctccagggcatttttttactgcaaggcctgtcatgatgacgtcacagatcccaaaagaattaaaaaatgtggctgcaggcggcgtaagtagtgtttctttctccctctccgccctgtttcccttcaccacccctcaattcctttttccttctccttttcctattagaaggacattaaacaccaagtgctctcttgaatgtgtttatgtattgtacccagcagtttaaagaaacataaatacctgtcctcgcttcaagcagaagatgaaaaaagaaaaaccatcacagtcagtgcctgggtgagaacctagtacctattgcccacctctctagaagtagacatctctggcccacacagttaagcatcatggataaaatggaggatacctacagctatggaagagggaatgttttttaataccaggatttctagtagctaggtggtccctaagtatagactatacataatcctagtaggaaaatgagtctcagaacctagtctaatcttgaaatcaaagcaccggaccgcctttcggttagaattcttgtaggttcagatttagatcacccccaaacacaaaactagtactcccagtaaagcaatcagccaccaatgttcaaaaggccatcctttacgtcagtaacctcaacgtgcccctacataaggcacattgctttatggggcaaactgctctggtctcagaagcttctgcatagtctgtctcagttgtcttctaccaaagctttcctagggaccctcagtgactgaggaacactggcttatgacttccacagacaacacgctgtaaagctggtctttgctttggggagggccaaccttttgcagcaattagaacacacaccctggaagagattgttctaaacattagagaaagatgaatgaagtgatacctctccttccatgatgacttgaggttctaaaagctcctcctgatggttgctttggtcctcaccataaccctacataattaccagggacatatttaatcaacttagagaaacaaggacccttacatgtttagtgagaggttgaaattgctgatagccatgcagccagccatcatagattcaagtctccgaggcctatcttggtgctgtgttctgagggccctgacctttctgataagagcaatgataaccttgagttaaatgggtgggaagagagttatggaagatcacccccataaaatacatttttacaagcagaaattagtcaaaaggccaccatttcttctaggatatgccacccaagggtcttgtcactgagctgcctgaggggaacgtgttaaaacagtaagatagaaagatggtaccacctaaacattaataagttggtttcttgggaaataccgatgggaagtacttggtctagcgaagttcctgtagaaatcctctcagataccctttcacacaccagctgaggccaacttcttttttttttttttttttttttttttttttggtttttcgagacagagtttctctgtgtagccctggctgttctggaactcactttgtagacccggctgccctccaactcagaaatccacctgcctctgcctcccaagtgctgggattaaaggcatgcgccaccacacccggcacggccaacttcttaacatgtatattctgcttcccccaaactctgtcagcagccctagaacaatttcctgattcgctcaaaccacaaggaacagcacgtgaatatgaagaaaggacaacatgagctcaactgtcagaccctaggcatcactcagccttcttaccatgtgtctgagaacgtagaagcccagcaggcatcctcagagtcattttcttcagaaggaacagggcatcctgagagtagatttaaacaagggggaacaccagagcaagatggtgagctccataaggaaactcgcacagtggtgatgggggtaaaatggctggaggaatgctgaggtcaataatccatgcgagggagtttctataagctttcatcctttgggagccttagtgaagtggtgagactatgggctactacttgagcagccattcaatgtgcttatgagtagcctcttcatgaggttctcttcttggtgccaatgatggaatgccgaatgagattctttccaagcaaagatatctagcaaatacagataaacccatatcatcttaccaaatgtataaacccatagaggtccacttgctaagaagaggacaagggatgtctgaggatatgagggctcttactgcttcatactttggcaggtcctttgggaggtggtagtggagatgagatatgggtgggaggaagagcaagggaattgactgaaaattaggaagccatttgcagtgttttgaggatggatagaaggctgctggggtctatgacactggagagtgatgtacaaagtgggatcacataggaaggcagagaagaagccgacaagctgaatttcagtcctctgcctgaaaactgccaggtaattttgggaaaggaggtggcctcaccaggtctcagttgaaaggatcccctttgcatctggatggagagttcactcaggaagacagaatggaagaggaaagttgaagagagaactctcactctctctgaaattataatgtcctttataggacattgtggcacatcccatttaaaatccttataaaaaatttgacttccagggtatttttttccttttcaggcaagtagacagcagtaaacttttacctttcttgttgtgaaaatcacactataatgtacagtacctttattcccttaatttcccttgtagtaggttaagctagtgaaatgtttgatctgccatcatgcatgagacacaattgctgcaaaaggattgtctccgccaagctactcttaagtgtggcaaggccataggctgtgtggttaatatttgatactaatcagaattgtccaaatgttgttattcccaattagaaggccatagcctggagggcaggatgcagacatgtttgggaggattagaataaaatgaataattgaatataaacctccctatgaaggccaggcactcaagaaatcagagaaaatatgtttggctctaaagaaacttttacaagaaatagttatcattgtcattatatataggaggatgctaaggtaccagccaggcacctcttcgtgtttaagattggaaaggacagttgactcacccagctatttatccaaacctcttagtgcatcaattcaccatggaataatacagcttgcacaagagcaaaaccactgacagtctccagaccctgtatgttttcccaacctcctgtccctacccagtttctccttcccattccctccctacctgttccattccttctcattcaataaccttcaatgtttcatgtcctcaatcggcgaagtatggcgtgtggacattccattgtggagatcccgtgctggtagtatagtttaacatgcacatctctttccatcccttcctagttctccatctgttcaggaagaaagtccaatccagatgtctagccaaggagcaatctctcaggcactagcatttattcattttcttttctgtgtcacaaacctggtctaatgatttatactttccctcctcccagcctctgaaaagttgccagggagagactcctgagggacaagtcatgtctagattgatgtgtgtgaaagaatttcctttaatttctaatcattgacatatctttgatttattttgtttcctctttgctgccttggaatacggcccctactctattttaactgcaccctggtagtgatctattgtgagtaaaatgggttccgagcagcccagagtcagttctcctggtcttttctctagatgagatctttttttttttcctttctgtacagttttagtttcattttacttttggtattcgtgttgcatgtagcagttacatcatgccccaactcgctcatgccctacacagtccttgtagagtagccaggaactggagagtgcccagagcccactctctatgcttccacccatcccccagcctccagcaagctctggacacggtcttatttttccattagaaaataagaccctgacaacagtgtgtttctcttgaaggcctttgctcaggacttttaagggacactggttaggctagagtaattacaactctagctatagatgctttgtccattgggggtcatagtcatgcttgcctttgataaacgacacttgtttttcccttctacagagcttgaattcctctcttgaaggaaacacataggctacatatatattcctaagttgtgatatatatatgatatgtcctggggtagcttatatgtaaaaatgtgtatttttatatataatcatagagatattccatagagagagaaatacaacgatcacattatagatgcctctctgtacaagaaggtgcttgctggagatttaattgaatactcctttgggactgtaagtatctgcctttctgaagacaagtggtaattatttcctacagtctacggcatttccttgctttcaaaacttctccttaagtcaacgctcagtgattcctccacagttcctctgggaaagttaagcatcctggaggagccatgtgcttatttcagggcaaaaacaaacaaacaaacaaacaaaccaaccaaccaaaaaacaaaaaacaaaaaacaaaactctgttagttaattcaaggagattactctttttttttttttttcatgagtgaaccatgtaggaatctaagcaagcctctagacttctctaacttactaaagacataagatccctgtcatccaatcggatatagttttaaaggtcagtatttctatgtataacctacaactggcagacatcaactttgggtcttgacttacagacataagactctctgaaaacaggagacccaatgtacaactcattgattcattggctctggactatggagatgtatcagcacccaggtctttcatcttcctttgcagaagaaggagaaggagaagaagcaagttgactcccaagttctggtagccttcactgtttggaaaatgtataatgttctgggtgaagccaaaacaaaatagcaaccttcttcaatacaacacacagttctgcccaaattggctctgcggaaagtacgtggaagcatcacttctacaccctgagagctttcacactctagcactctttgagaactagacggccacacaaagccagtcaacacacagctccagaggcagtctctctcaccttcctctgccacagcgtgactgttgtgagccagatcaactagctgggtgtgtactccaggtggctgactttaggctctgtccttgcctttttctgatcacagaaagccatgcataagacttttcttcttcttcaaaaggtaacaggaggaactgggttcaggggagatatcatttctcatttataggatttaaaagaccctcttattcctagtgtttcatctaacaatatacctcagacaaaagggtttttcttttgtagaggattttgtttataatttgagcctttgaagaatggtttcatgttaagaaacaatgcttcccttccctagactgatttaaaaagtgggctgtggtctaagaagtgtgccttaatttaacagcatttttttttcctttcacactagtctcctcttacatatactcccttggagaccaaattattttccctctagcatctggaaacctccactttggcctctttggcaaggccacttttcctctcccttccaatccaccccccaaattaagattctgcaattgcaacttggctggccatttggttgctgatgccggaggtagatggcactgcagacagcatgggctgcaacccttccttccattccagacttggtgcagaagggccaaccagcagaggacctgaggcctgatacctgattgcatcagtgtgccccaaggaaagaaaagtgaccatgctccatctgcagcaggtttcatttcttagcaacacgacctttgacaacagaggaaaagtcgggcaagtgtgtctctgagaaagccttccactgtaaacattcaacagtaaacagatagctttgatggtgtccactagggaagtacttctgttttgtctctataaatactactaggaagtcataatggaagtattggatgggcatccattttattgtgttgaagagaagcacatgaaagctttcttctgaagcgatgaaactgctcaaacaaagttatctgttttttagaggaaggtgagacccaggatcagactcttggcactgacatgatctcttcacatcattggtactggtccaagaacaagaacattttgtgggccaaagagaaaaggaagtctcgggtggcttatatatttttctttcccagagttaagttggcctatgggggcagtttatagagcataaagttccaagagccccaagacagagtgacaagtagccacaccattaataatctggcccagtccctctctcaggaagctgctgcagagctgaggcatggggaccccatccaccaatacacttaaaccaatgtgtttgcaagttgccactgttgaccgccccaggatgctgtcccaggacctttcagccatttgtcctcactacccctaaacatccgccactgaactgaaataacaccacaagatttcaagtcttagagaggagacaaggcctaggagagatgaaacagcaaggtcagggtttgctctgttaaggagctgcttgctctcctacagcagtccactagatgtcctcatagacctactctgctctgctctcacactacagaaaacattttcattggtgactgggaagagcggtggatggctactaactaagaaaggaactcagcaaacaacagtggagagaagattttcttactttctttttttttttttttaatgactaggaatacatgagaaacgtgttttaaatagatactgaagtattgcaagtaggtctgtgaaactcaaccttaggggtttaaagtacctctctgatactggaaacaaatcctctgacccaaaatcggatgtacaaaaaaaatagccactaagaaggctctggaaatctgtaattcactggaaccaaagtgaagggttaggaagctgtagagttgaggaaggtgacagaggaagtctgtgatgtagtactgatacaactttattttataacccaagaataaaatgcccacatattctggaacacctactacaagggaggcaaatcttcagcttttctttgctaatcttcaccatgagtaataacggtccagagggaatctcttaactgaacatacatccctcaaccctgatggattgctccatcagatgcaaggtcagaatcacccttctcctcggcttaggaaacagacctagaagcacataggtgatgacacacgtgactggggtggtgcagaaggggggcacacacttaactggttgtctttactctagaccttgtggttcatgaaggtttgtcaatatgtggggctcaatcatttttaactgtttttgtcttgtctctgagcctcatgttgatcattcttgctggtgtgtgtgtgtgtgtgtgtgtgtgtgtgtgtgtgtgtgtgtgtgtgttgctctttgtcttttgagatttcttttctgcatttggtgggagtgtgaaatgactgggcaggagtgttgactaagagcatgttttctgttttatgcatatgctgctctggaatgtgactgcttataattaacagttaatcttcttatagcaaatgggtttctgctgcctcagttaccagttgcagcctgttactgcatgctaacaatatgaaattttacaacagtgcatggtctccggaacagccaaccatgacagttgcaaacagtccctgaaagccactggtttggtgttttgctccttcctgaacattttggaagtgggaggcttccattgcccattgtgacaagttgacctctgtggggggaaaaagattccaaagttacctattcccatcacccttccatatgtatatatatatatatatatatatatatatatatatatatatacacacacacatgaactttctttccccataaatgtgtcacattctattaccatgcatgaacccgaaatggcagtatgaaaatgaaaaccagggactgttgctaatgagaaacatagcatttctgagtttgatgggattttctgctacagcatttgatttaaaaacagaaaaaaagaaaacaactttcaaaataatttatctacagtgaaacaacaaacaaacaaaacaaaaaaatcatctccattctcctcgcctttgtaagtaacaggtccataggtccagttaaagcattacgaaagaaaaagcaaaagactggctttccaagttaaataccagatctggatacgattcagctaaatttattttcatgtcttccattgaagatttttcttttctcccattcttgacttcagccactgctgttgatcaagatgacctggacattggctgcaagccttgggggttcctctgactcaaatgctatggcagattcttagttttattttttttggtaacaagctaagagcaaaagaatgacacactttaagttgaacagggctggggttgcatgttaatcagtgcaacagttaggatgctaaaggaccatgtcactgggaatgtgagcctattcacaggaatggagatgctgttggaggtctctcattcatctccccccagtgcctgctcttcacagtcatgatgttctccttgcttgacaagcccactgtatggcaagtcattaaggtcttagaacagggcttgacccatgtgagagatttaaaccctttcctggtgactgtaacattcaaagagagtaaaaccacaagttatattttaaactaagacagtgactattctctacaaaggaaaagaaataaggatagtgtggaggacggggtgggagtggagataacacctccttggtccaagttcagtgattggctgtgatacttggaagattaatgagtttttctcctaccctgtaagaggagcaggctggttcctgctaagtgagaagcaaacatgtttgcctgttgtagcatcaaaaagaggtgcagtggcttctcttgtactgaaatataaattgaccacaagagtaaaacaggaaacaatgggggcattaaattaacgagctttgcatgtcggtatttgaggtggctccagggtcagtaccaaaccttcacactatgccagagtcttaaaagaaccactgagggttcctgaaaatgccagcaagatatttcacatgccaagtatttcatgttttgttgtttataatctctcttggctaatattttctgtgtaaggaaaaaagtatgattaaaccaactaattgccttctaattctctggtgggcagggagagaaaggcagctctcccagttgatactcccatgagtagctaaaagcaatctaggaaaccaacatctcatattgctttgggtgatttttttatttttttattttttgtgaacttcctttaatgtatccagcgttagccctgagtagaggcatttcttatatggacagatttggatatttgttctgtcaagagtaaatttaaattcctgtagctatcatgtaaactcactcccgggaagttcagcgaaagcatcctcagatctgatattaacacgtaatcgtttcacatttaatttgatggaaacttgtcgcaggctctgcttaatgcccagaaatagatgaaaatgagaaaacctacatattagatatgtttatatcctgcaaaaaacatttattgtaccaaattagcaattcatttaactgattggctgtgtgtctcttttgccctcctgcattaattttgtcagggggagaatggtggttacatcttttttttctgtctgtaatttgctttttttttttcatccaagaaacgggatgtgttcagccatgccttcttcctgtggtcacggctccatcgaggggacaaaaatgatatgcaacagcctttgggaatgataaaggcaatttatattttcactgcttctttttatttttgatgtacaaccaaactgtcaccaacaatcactgcattttttttcttctgtttctgggtcaagactgttaacgtgaactaagacctgtgttcaatcctccagcgcccttccagctgccttgctgtatgtgaccttgccattaaccgcgctcttcctctcctcccatccaaccacatggttatagccaagatgtccatctacaagagaatgagacgagcatgttgttttgattgcggacgttctgagcgtgactgctcgtgcatgtcaggccgtgtgcgtggtaacgtggacacccttgagagaaccttcccgctttcttctgtctctgttaatgattgctccaccagtttccgtgcctgtaagtttaacctcaacacacccagttccatgtctgtgcttgtctgtggtaatcagccctgtgttttgtgttgtgccctgtggtcctgtaagtccaccgagctcatgttgccattctaatgtggtcttgtatgtgatgacatgttgcttgtgttcctgtgtatatgatgaaaaggctttcccttttgccctggtttatgcttcttgggatagtgaacaaaacaggcatgtgacagcctgcagatggtcttcctctctcttgcctaaataggtgaagatggaaagccaagtgacaggatagcaagcactattttaatagaagatatgtgaaaatgcaggaatttggatttataagtgaccattaattggggtagagtaaaaagatggaagaaaaggaataggagaaaaggtttgctagcgtttcaaaatacaacagcatctagatgcagatgtttgttcatatacatgtgtgtatattcatatgtgtgtgtgtgtttattcctatgtatttcttactagagtctcattccttagtaccagatggtattttcagttcttaaagagaatatttatttttaaatctgccaacctccatagactggtaatttctagtgcttctttcaaaaagttggctcgttcaaaggaggctcctgggacactcattaacatcttatattttcccaacaatttagtcccactttaccaaggtattgtgcagcagtcatgagtctgaatatcaaaagattgacatcccaaatctgcaggattttcttcactttatggctcaggcctttgtcaccgccaggctcttccctgcactagatgccgaaatagttgtgtgtttgacagctgctgagtctgatgaaccaaattcctcttccatttccatttggctggcacagttggtagatgatgttgttgtggaatgctttggtttgagatgctgagatgtctttccttgtccactggcaggagatcttaaattctgcacaaggacttgaatgctcttgaactacgaccataactgtgagctcccattggtgatagtataggaagtgggagacgatgactgtctctccgtgctttaaccatttctcttgaaagaacccagcacaattcttggtgctgttttggcactctgtccatccactcttcccctgaataatcaaaagtagttaggctttttcttccttgctgtggttcacacccaccacaagggagaggaggaacatttagtttctgagcatttgttcctatggcaagtgtgtgtagctgagtcaccattgtctgtgtcgaagatggcttcaacacaatggacttgagaccacaggtcactgtctggcaggaaagataactgccttcactagctagattgctaagccatgccaggtactgatgttcaaagctccagttcgtgtttatagtctgtaagttgtgtgttgaggtatagactaaaactatatattgaagctatatattgaagaggcttgatctgagaccagtgagcccccttctgtttcacaatgcattgctccttgaaaagtgctgagggactgaactgacttaaaagtggtacttaatgagagttgtactgagaaatattatggactgcaccaaccacattggcccaagagcttagaaaggacttttcttttggtttcctctggtttggtttcaatttgttcttacatatgctcagttcgagtccatacccctttatcttttctcctgcaagaatttttcctcatttatgtgctatgcagcctgggtaacccaagtcacaaccatacaaagcatttgtctgtgatgtacaccaagacctcaggttcaaaaatgagtcggttaggaagacaatggggtaagctacggtggcaccattgggtcacatctctttgattggtaatagtgtctgtgaatgccagcactcttcagcctacagcccaacttcttttctaaaataactgcttggccacagatttgttagaaaaaaaaaaaaaaagaagccagtctggctctgagctaggatcctgtcatgagctgtggtcatgtcttggcccactggccttctgctctaatcatagtaaaatctatgtccctatttgaggctcatggtgtccagtgtgtgcactttgcattttactcaagaaaaaaaaaccatagttagaggggtttctcagctctgtaatttaatccaaatactggtggaggccaggagaagaaaatcttggggtaagaatgtcccatcctctcagatatattctgttcacaatattttcatccttctggctcctccatcactaatctcactgtgggagacagcaggattcaagccctaagcagtattgacagctctagtggtggcttgccttctctgtctcatcatcttcacttcgccacacaaaggcagatttcatccagccctgtgtgagaccactcacctttgaccacaagtaataagttagaaaaatccactccaagttgaacccctttataaggctatgtcagcccttcttgttcaattaaaaacaaacaaacaaacaaacaaaaaacaaagaacttcagtctctgctgaattccactggcagtgtgccacggcaatgtccgggcaccccattcgggtgggtagtcggttgggtggtgtccatttgacagagtgaatagactcagagcagtggtgagagtgggcttttcattaaatatgagcagacgtgaaatggagagggtttgacaattagagatggcaggagaagggccctggaatcaaagtgagctcacatgggcagatcagattacttctcttacattctttagttgttctgaagatcattttgaattagtgtcagtggaaccatgatgggttttgccctttgtcttttacgccgtgcctgtattgtttcccaagacactcattaaaggtcattacactattacggggcttgctttggtcgcagggtttccagttgagccagttgcgctttggagactgcctaattcgttcccctcttgcctagactttccctctgcaattttttttttcaacttataaaggaaaggatttccgtttttaagggactttaaattgaaacacaaagccccattacatgttttctgaagtggtaagggaagtagctggttcccagaggtggtcatatattaacagtgtttacagggatttgaagacccgtcttctaagtgctgtttgacacacctctccttggaggcgtggcccatgacctaggaacagtccttgttaaggctggtgttaggaggccatttgtctaatattgtactcacaaggcaatgggaagccaagccattaataaggccttcagaggggaaggactaatttttacagatatttttgtttataagtatcatgagcctggggagatagcttggttggacttgatatgcaagcacaagaatcttgagtttggatcccagaacccacataaaaagccaggcatgatggttcatacctctaattccagcacttgctgggcgggtgaagaatgaaaacaggcagattcctgaatctcatttgtcatttaacctagccagattgattctcttcagatttaatgagagaccctgtctcacacatgcacacacacacacacacacacacacacacacacacacactaaccattcatccacaccccacacacacatacacccacacaaaactagggtggatagtgaccatagaggatgcataagctgaattgttcaatatttaagtctagactgggtattcatttctcaagactagaataaggttgcacactaaatctagatgaagtgctcagtctagaattacagcatcattttctgattatgtaggttttatttatacttcagacagtttgggcactgtgtcagctcccttcaaaaacaccaggatactatgcatttgacttcttcacaagtctctgttctagtacaggaaaaaaaaaaaaaaaaagagcaaacctcccaacgtaaaatctcatttgcgccaatatagatatagattttaatcagctccgctctgcccaatataactttgtgaaatggacattctctctctttggaagtttatccttgattccagttttgcctggtggtctggttgccaagtgtaatagaaagggacaattaaaattatgatgtagtgacaatgaaaggccctattgatttggacctgcctagacctgcctgatgtgattctggtgacagttcgtcagtaacgctggtgtaagcaaattaatcaagttgggagggggggggagaaaagcaggcctttgggtttgcactgggaactggtgttagctcaagcatacctgtgattcttcagaccatctttctctcactcactgggagtttacctgaacaattgcacagaggattcagaaaattactgaagctaattttaaactgtgcatgacttttccttcttgtacacagagatcacagtcattcagctcggatggttaggctgcgaggagcgacccaatcagattagctggaaaggagacacactaaagtcagtttagagtaatcgcgagtcttgccagatactaaactaaaccctgcttatcctcagtggtctttggtttgttcagggagagaattaacattgccaactgagctgaaggctttccatcaaactaatggcattttgaagaccataaaggcagatagatactagggcaagatactagaaacagctttaaagtcttccccaggtcacacctatgccaacagtcttcaaagccctggaagagacatgaggtttagcaagctgcatttaaacaccaccagtctgtaatcatagcatcaccttgatagacagtttggagggactccccaagtccccacctcctgagtcttcaatgttacacatttacttctgggacccaatgactcctcatcctgtcatcagtgaagaaacagggaaaaagaaatccagagggtacttggcatacaagttaattttagaatttcatgggtttttttttaattgatatatattgacggaaatgcataggatacaatgtgagttttccatgtgtgcagacatagtgtcaagatcttatcagcctaattagcatgtgcgtcacctcaaacatcatttctcgtgatgaaacctccacaatcttctctctagctgttttgaatgacacattctgagtatcatcacctggagagagcctgctagcccactgggctcaagagttccttctttccatttcattacaacttttgctcaatgactgcctcctccccgaacctctcatgcattctctttaagttcatgaatctgtgtctctaatgtctccctctgttttcatgcaactgtgccaatgttttcatatccattttcattctctctctctctacttccctcaaccctgtcacacacattggtagcaaacactaacagacccttttaattctcaggctcttcagccaaccttggccctacatcctgatttatttatttgcattgcgttgtgggaagtgacaataggataaggaagagaagtgggacctggctaccattttacccatcataagagaccaagattaacaatgttctcatgaagagactcttcaaatatagtcattgccccaagcaaggtcactgaagccaacatctcttgcttaatttccagtaggcacattgggcagagagttgactggaaagtttttctcttcaagtaaagagtcacctcacacacagtggtgagctgctagagtgagtaatgtctaaggcagaaatcaacctttgtcaataacctcctgggaaaataactcctgaaattaatgatcttcaaagaagaaccccaaacaaagcccattctcatccagtatgtgatgctggtgtttacaagtgccacgtcaaaggaagtaattggtttacagtaagaggtcctgcacctttcccttgccccccagacaaggttctgttgaatcccttaaagcaaataacctgtgacagtctactgggttcaaatggaagagaacgttacagtagactgaagagtcagtttcaaaggacattctctgacatgggattgagaaatgggaagtaaaaaggccagaatgagggaagaagaaaggacccattctatgtacactgtcacttagacatttccctttccaggagttccgtgctataaaaaataactctggctctttaacagcaaatgaagaaatacgttggcataggtacactagacagaggtccttattcaaggtgacatggaaattatgcttgcatctttattttaggacagtggccggctatcaggatactggtcttgacagctgtaaccacaaggcagtgggttcttcttacctccatggtggaggacagatggagccagctagcacaccatttctcctcctcctccactatcatgggcgacagatgccagagccagcctgctcttcacttaagccttcttgtcaaggctctgccttgagcccaaattctgacctttacttgatgaaataaattactgatgaacaagcagaggtttgaattagagcaggcttggagcaaatgtcaagcccgtctccctcctcctacctccaccaggagcatggattagaccaagtctggagtttccaatgccttaggctttatgggtctggggagatataacttattaacaaagagttattaaatttttatcaattttacaacacaatgtaaatgcctcctatgaatctacattgtattcattatcatttaaaacgttaattaagtcaaagttgcatttaatttctctctaaatgggcctctgggaagaggcttttagaaacatctgtgggagcaggcagctatggagccgggaagcccccagcctacattcaggagaagttccttgagctgattgctatggtgtgtctgcagctaatttgttatgatatgattgggcattgtctcaatctgacatcagactaacagtgggcaaagccagtcgagagagactgtgggctgtcgcactggcttctaggcatccttcctttagacactacctacatgggtggcacagttcatgtgtggcacctccgatctccattgcacattgggatttgcccatcatttaagctgtttagatcttcatctgagatagacagttgttgcctggctcagtcacattaggacattttctgtggcatgcacagaaaagatattcgtctttgatttccacttgagcccagaagtacaggtcactataaccctttggtaagaaaaggcacagtgagatttgatgaaaactagctttccggatttgaaccggcagtggtacccttagcttatgtgagcacagaacagcaatcctgcatgtctttacttctatacatagcgtgggggctaggtttgctacttggttaatttggataatgttccgactagatggtgatgtcactacactaagtctaaggtactctgccaaagcagcaagaatgggcagctgtgttgtttaatttgaaatgtatgtggtctttgcttcctgccttgcaggtgctactgctgtcggcagattctaattcacccctgctataggtagttagcactggctgcgggccaatgtagctgtaaactgaggcagctgtagtacacctcatctgtgtagtttcagtcatttgatgagaaagcagtggtaaagctgggatttgaatacaggttggtatggctccattttccctgggtaagttggggcacttagatctttgcattaatgaataaggttcataacccagttcatctctgtgggaagaaaaagagaagctcatggcagtgttggagctagatatgcacaatgtcagagtccttgaaaagcaagcagcctggggatccatcccataatcagccaccaaacccagacactagtgcatatgctggcaagattttgttgaaaggaccctgatatagctgtctctagtgaggctatgccagtgcctggcaaatacagaagtggatgctcacagtgatctataggatggaacaccgggcctgcagtggaggagctagagaaagaacccaaggagctgaagggctctgcaaccctataggtggaacaacaatatgaactaaccagtacccccagagcgcgtgtctcaagctgcatatgcagcagaagatggcctagtcggccatcattgggaagagaggccccttggttttgcaaactttatatgccctagtacaggggaatgccagggccaagaagtgggagtgggtaggtaggggagcaaggctggggtggggggaagggtataaggaatttttgggatagcatttgaaatgtaaataaagaaaatatctaattaaaaaagaaaactattaagaaaaaaaaaagcagccatgggcaaggcttgggattcattctgtagaatgtggggaaagaagaagagaagatgaaataggccttggtagaggccaggcaagggtgctgctcttaatattcagtgcaataggaagcacctaagatgtcagactggggaaacgaatcaacaggtccactgtagtgggttccataaagatcccaatcatggtgagatatctgagaaacccttctacacccccacaaaaaggaaaaggccagaggctgtgatgggaagagagtagaggagctctaaggaggttttgaagaaagccagcagggtcctctcagatgaaggccattaccaaatactagtccaagaaattgtggtttccttaaaaacaattaacagatcgagaagttggattccattttttagtgaaatttcctaagccaagttctcccaggctgactagcagctggtggaattccttttttttttttttttttttttttttttttttttttttttttttttttctttccattttttattaggtatttagctcatttacatttccaatgctataccaaaagtcccccccatacccacccacccccactcccctacccgcccactccccctttttggccctggcgttcccctgttctggggcatataaagtttgtgtgtccaatgggcctctctttccagtgatggccgactaggtcatcttttgatacatatgcagctagagtcaagagctccggggtactggttagttcataatgttgatccacctatagggttgcagatccctttagctccttgggtactttctctagctcctccattgggagccctgtgatccgtccattagctgactgtgggcatccacttctgtgtttgctaggccccggcatagtctcacaagagacagctacatctgggtcctttcgataaaatcttgctagtgtatgcaatggtgtcagcgtttggatgctgattatggggtggatccctggataaggcagtctctacatggtccaccctttaatctcagctccaaactttgtctctgtaactccttccaagggtgttttgttcccacttctaaggaggggcatagtgtctacacttcagtcttcatttttcttgagtttcatgtgtttaggaaattgtatcttatatcttgggtatcctaggttttgggctaatatccacttatcagtgagtacatattgtgtgagttcctttgtgaatgtgttacctcactcaggatgatgccctccaggtccatccatttggctaggaatttcataaattcattctttttaatagctgagtagtactccattgtgtagatgtaccacattttctgtatccattcctctgttgaggggcatctgggttctttccagcttctggctattataaataatgctgctatgaacatagtggagcatgtgtccttcttaccagttggggcatcttctggatatatgcccaagagaggtattgctggatcctccggtagtactatgtccaattttctgaggaaccgccagacggatttccagagtggttgtacaagcctgcaatcccaccaacaatggaggagtgttcctctttctccacatccacgccagcatctgctgtcacctgaatttttgatcttagacattctgactggtgtgaggtggaatcttagggttgttttgatttgcatttccctgatgattaaggatgttgaacattttttcaggtgcttctctgccattctgtattcctcaggtgagaattctttgttcagttctgagccccattttttaatggggttgtttgattttctgaagtccaccttcttgagttctttatatatgttggatattagtcccctatctgatttaggataggtaaagatcctttcccaatctgttggtggtctctttgtcttattgacggtgtcttttgccttgcagaaactttggagtttcattaggtcccatttgtcaattctcgatcttacagcacaagccattgctgttctgttcaggaatttttcccctgtgcccatatcttcaaggcttttccccactttctcctctataagtttcagtgtctctggttttatgtgaagttctttgatccatttagatttgaccttagtacaaggagataagtatggatcgattcgcattcttctacatgataacaaccagttgtgccagcaccatttgttgaaaatgctgtctttcttccactggatggttttagctcccttgtcgaagatcaagtgaccataggtgtgtgggttcatttctgggtcttcaattctattccattggtctacttgtctgtctctataccagtaccatgcagtttttaccacaattgctctgtagtaaagctttaggtccggcatggtgattccaccagaggttcttttatccttgagaagagtttttgctatcctaggttttttgttattccagatgaatttgcaaattgctccttctaattcattgaagaattgagttggaattttgatggggattgcattgaatctgtagattgcttttggcaagatagccatttttacaatattgatcctgccaatccatgagcatgggagatctttccatcttctgagatcttctttaatttctttcttcagagacttgaagtttttatcatacagatctttcacttccttagttagagtcacgccgagatattttatattatttgtgactattgagaagggtgttgtttccctaatttctttctcagcctgtttattctttgtgtagagaaaggccattgacttgtttgagttaattttatatccagctacttcaccgaagctgtttatcaggtttaggagttctctggtggaatttttagggtcacttatatatactatcatatcatctgcaaaaagtgatattttgacttcctcttttccaatttgtatccccttgatctccttttgttgtcgaattgctctggctaatacttcaagtactatgttgaaaaggtagggagaaagtgggcagccttgtctagtccctgattttagtgggattgcttccagcttctctccatttactttgatgttggctactggtttgctgtagattgcttttatcatgtttaggtatgggccttgaattcctgatctttccagaacttttatcatgaatgggtgttggatcttgtcaaatgctttttctgcatccaacgagatgatcatgtggtttttgtctttgagtttgtttatatagtggattacattgatggattttcgtatattaaaccatccctgcattcctggaataaaacctacttggtcaggatggatgattgctttaatgtgatcttggattcggttagcgagaattttattgaggatttttgcatcgatattcataagagaaattggtctgaagttctctatctttgttggatctttctgtggtttaggtatcagagtaatagtggcttcataaaatgagttgggtagagtactttctacttctatcttgtgaaaaagtttgtgcagaactggaattagatcttctttgaaggtctgatagaactctgcactaaacccgtctggtcctgggctttttttggctgggagactatttataactgcttctatttctttaggggatatgggactgtttagaaggtcaacttgatcctgattcaactttggtacctggtatctgtccagaaatttgtccatttcgtccaggttttccagttttgttgagtatagccttttgtagaaggatctgatggtgttttggatttcttcaggatctgttgttatgtctcccttttcagttctgattttgttaattaggattttgtctctgtgccctctagtgagtctagctaagggtttatctatcttgttgattttctcaaagaaccaactcctcgtttggttaattctttgaatagttcttcttgtttccacttggttgatttcacccctgagtttgattatttcctgccgtctactcctcttgggtgaatttgcttcctgtttttctagagcttttagatgtgttgtcaagctgctagtatgtgctctctcccgtttcttcatggaggcactcagagctatgagtttccctcttagaaatgctttcattgtgtcccaaaggtttgggtacgttgtggcttcattttcattaaactctaaaaagtctttaatttctttctttattccttccttgaccaaggtatcattgagaagagtgttgttcagtttccacgtgactgttggctttctgttattttttttgttattgaagatcagccttagtgcatggtgatctgataggatacatgggacaatttcaatatttttgaatctgttgaggcctgttttgtggcctattatgtggtcaattttggagaaggtaccatgaggtgctgagaagaaggtatatccttttgttttaggataaaatgttctgtagatatctgtcagatccatttgtttcatcacttctgttagtttcagtgtgtccctgtttagtttctgtttccatgatctgtccattggtgaaagtggtgtgttgaagtctcccactattattgtgtgaggtgcaatgtgtgctttgagctttactaaagtttctttaatgaatgtggctgcccttgtatttggcgcatagatattcagaattgagagttcctcttggaggattttacctttgatgagaacaaagtgcccctccttgtcttttttgatgactttgggttggaagtcaatcttatcagatattaggatggctactccagcttgtttcttcataccatttgcttggaaaattgttttccagccttttattctgaggtagtgtctatctttttctctgagatgtgtctcctgtaaacagcaaaatgttgggtcttgtttgtgtagccagtttgttagtctatgtctttttattggggagttgagaccattgatgttaagagatattaaggaaaagtaattgttgcttcctgttatttttgttgttaaagttggcattctgttcttgtggctgtcttcttttaggtttgttgagggattaccttcttgttttttctagggcattgttcccgttcttgtattggtttttttctgttattaccctttgaagggctggattcgtggagagataatgtgagaatttggttttgtcgtggaatactttggtttctccatctatggtaattgagagtttggcagggtatagtagcctgggctggaatttgtgttcttttagtgtctgtataacatctgtccaggctcttctggctttcatagtctctggtgaaaaatctggtgtaattctgataggcttgcctttgtatgttacttgacctttttcccttaccgcttttagtattctatctttatttagtgcatttgttgttctgattattatgtgtcgggaggaatttcttttctggtccagtctatttggagttctgtaggcttcttgtatgttcataggtatctctttctttatatttgggaagttttcttcaataattttgttgaagatgtttgctggccctttaagttgaaaatcttcattctcatccactcctattatccgtaggtttggtcttctcattgtgtcctggatttcctggatattttgagttaggatctttttgcattttccattttctttgattgttgtgccgatgttctctatggaatcttctgcacctgagattctctcttccatctcttgtattctgttgctgatgctcaaatctatggttccagatttctttcctagggtttctatctccagtgttgcctcactttgagttttctttattgtttctacttccctttttaggtctagtatggttttgttcatttccatcacctgtttgtatgttttttcctctttttctgtaaggacttctacctgtttgattgtgttttcctgtttttctttaaggacttgtaactctttagcagtgttctcctgtatttctttaagtgatttattaaagtccttcttgatgtcctctaccatcatcatgagatatgcttttaaatctaggtctaggttttcgggtgtgttggggtgccctggactgggcgaagtgggagtactgggttctgatgatggtgagtggtcttggttcctgttagtaggattcctccgtttacctttcgccatctggtaatctctggagttagtagttatagttgactctgtttagagattgttcttctggtgattctgttaccgtctctcagcagacctgggagacagattctctcctctgagtttcagtgctcagagcactctctgctggcaagctctcttacagggaaggtgtgcagatatcttgtttttggacctcctcctggtcgaagaagaaggcccaaaacagggcctctctcagaagctgtgttgctttggcagttcccagaagctgtcagcttctgtggtgcagactctcacctgtgcagactaaaatcctaagttccagggagtcctggaaccaagatggtgaccgctgctcctgaggccgaggccgtctcccgagccaggcggacacctgtcctctggtccggatggtggccggttatctgcggcccgcccaggctgctgcctcagcggctctgtgcttctgcccgttccagaagctgtccggttctctggcacaccctctaacctgttcagactaatttcctagattctgctgagtcccggaaccaagatggcgaccgctgctgctgaggctgaggtcgcctcccaagccaggcggacacctgtcctctggtccggatggtggccggttatctgcggcccgccccggctgctgcctcagcggctctgtgcttccgcccgttccagaagctgtccggttctctggtgcaccctctaacctgttcagactaatttcctaggtcccgcggagtcccggaacccagatggcgaccgctgctgctgaggctgaggtcgcctcccaagccaggcggacacctgtcctctggtccggatggtggccggttgtctgcggcccgcccaggctgctgcctcagcggctctgtgcttctgcccgtcccagaagctgtcaggttctctggcgcaccctctaacctgttcagactaatttcctaagttctgctgagtcccggaaccaagatggcgactgctgctgctgaggctgaggccgcctcccaagccaggcggacacctgtcctctggtccggatggtggccggttgtctgctgcccgcccaggctgctgcctcagcggctctgtgcttccgcccgtcccagaagctgtccggttctctggtgcaccctctaacctgttcagactaatttcctaggtcccgcggagtcccggaacccagatggcgaccgctcgctggtggaattcctacttgagatttttggagttttctttaggggaggggcatttacatagtttggcaagaattggagacctacctggctgtgctccatctatttccttttcttacccagtatttctttctccatacaccatttttcccaattgaataaaccttgagcgtgttgaaggtgacagaggtggtcagctcaagggctgttgtgatagtattggcttaggcagagcattggacaaatgaggccaccaactgggacacatgaccagcccctaagggtcctggcttcaacagtgtgtggtagcttcagttccagatcatggaaattatttttgaacatctcttagtatggcagggatgctttccccctcccatctctctcagggagacaatgtctccttccatctacagaatctacagagggggggaaataataagtaattcactgcctgctcactaaaacccactgcagttttcaactgcttaccctactccaggggaaacatgaaacacatttcctgtgaggtacacacacacacacacacacacacacacacacacacacacacacacagagagagagagagagagagagagagagagagagagagagagagagagagaatcatgtagcatttctaaggattgtggcacagttttcttttccattttgcttctttctgcataaacccctttcctccctctgtattcattgtccacatctatacctgtgacatttatgtgcaccgtcaaccctaaaggttcactaaaacagcatagaaaagctctgtgccttggatttccccattatggtaggctgtacgtgctaaggatgccaacttccggaagtagaatgtagctgagtgcacttgaccatctagctgtctgctagcttccactctctagggttttccctttaaccagtaggctaagccaggtgatcctccatttgctacaagagttctgcttctcctctaaacaaagtctgcaaagacagacagaatgaaggcagccattttcaaaacactggggactggagaaacctctttgtgtgtctagatagtgcctgttttgaaggtagatttctacatgtatgcagagtcttgtgaggaagcaggtttcttatgatcagcttagaagggctgggctaaaccaaagttggcctccccccatgcacacacttctccctccctccctccctccctccctccctccctccctccctcccaccctctctccctccctccctcccttccttcctcccttccttttgaccatttcatttgatcatcattggtaggtacatttctctcacatccaaggacaacagtacaaggtacaaacaaattctcttggcatcttctagttagctaggaagaacctgtcctagcccctttaaacagaatgtgagtgccaatcatcccctcggctacagtggaaatactatacaaactaaaagtgaactcttaaggcccatccatctcaggattggtcacctctcatgacttttaaatgaagtaagaaaattcctgcttcagaactagaactataccagctgtgtggatgatgacagaggggccagagctgtgccagaaatatagatagtgactggagcatttatagacagaggcacatgaaccatcctttgggagcagtgttctttacatggcctaacattagctttctgggctggaacctgttggatcttattcgatcaagaatggacttaggggctgccttccgtccgtacatggtcagaagtgtagcagtctggtgtcaccgacttggcatcttgtactggcaggaacacgtgtagaaaatggcctgaaggattccagttcagtaaaaatttcatgagtaaaatataaatagatgaagggattctccaccattgaaggggtagatggcatgcagaaacaggctcaccgcagattaatggagttcccctaaaggtctctgagcagcttaccatagagcatgtctgtgcacaggtaagagctagaatgcccaaggaacttaagaggggaaatggaataaggaactaatttaggcgtaacttgaaagtcatcaacttatgtgtacagtcagcattctttgtggaggttaagtcctgggatagaagatctagaaatgacgcatagggataaacaacaacaacaacaacaaatgggtaggcaaagatccagttacttttttttttttcttaaagtcaagagaggtgaggatcctaccatttatagagcacacattctagaagaccagggacttgtgatgctccatttagttttattaatttcagtggatccgaatgtttttcgtaggagtcagggtggacaaaataaagcagaaagggtcagcatataaacagaggctcactttgggaaggtgtcactatcttcagacagatgtccctacctggccaagggaacaaacatttgggactcttcaagacttcaggggaggtaggcagatctaatctaccatcagcacttagatcatacttttattccctctctggagacttcacaggccagatgcttacacctactctctgtgagagctgttatttgacttcactctactcaagacaagcaagggacatgctacactcagaagtgagataatacctccagcgtgaacgcttccaagccagcaccatgagcaggcattacttcaaaaggaggtagagtgagtgacctgccatgaaaaaacaggaggtggaaatgcatctatgaagtattctagaatatatgcaagggcaaaggaattgtaatgtggttagcatcacacaggcagacatcttctgtatcttccaattacagtcaaggtgggaattcttggggctctttactattcagtgagaacttctcactgacaattgaaattggaaatccgaggaaccttagagcaggggaagatacgtgaagggtacaatctgtggagtgctgttttgtgtggtgggggactttgaagtaagtcccattgtgatcctgttttaatatggtcatcaagtatcaacttagcagatgctgattgctgcagtaagaacagtgttgtatgagggtatgaaacatgatacttctcaagacaatgatatttcatctgggcagtttcagaatagacatcatctatttctgccctgggtctctaaataatttccggaacgactttccccatctgtatgatgaagttaataataggacttatctctggggctgcaaggaaagtcataggtgcagagcatgcacacacatgcacacacacacacactctctctgtctctctctgtctctctctgtctctctgtctctctctctctgttacatgactaccttgcacatgttgagtattatgatctattattgttattatcatcattcattaacacatgaaaagatgaacttgactgaaatcacatagtgagtgagtagatgcttagatcgaaagaacaccatccttcatggtatggatgggaataatgataagtaggcactttgactatagctaatgcatttctttttcacatgatggagtcttgtccagctagcctcatgaaaggaccaatcaattatagcagagacagcccatggatgggagctgagagttgaaaagcttagcatgacaggctataaaattaaaatagaatcaattcacttaatttccagatcaaggaataatagtctcaacagaaataagcttacaaaagctgtctccctaggacgttgctttccatcttgaataccctgaaatcttggtcatatttgtataaaataaaagaatcagaagatatgatctctaacatcccttgaaatcctgaaactcccattctctattttttctcactgaagcttttggatttttttaaaatttcaattcttactggcataaatctttccataatgccgaagtctgcctaccaacgttctaatgaacgaacctgttgagggaaaaagaatgaaattatttgagtactgaaagtattgagtacctgcttggttgttgctctgaagttgggtccttggcctatggccaggtgccaagattgagaatgcccggaggactgcactttgtgatgggctcattctgaagccccaccctttgaggaaggctgaacagagaagtatgcctccatcatgggcttatctaaagcccggggacttgagggttatcaatcatcataccacacaaccagtgcccagcctttacataatgaatggctgccagcaagtgtccttcacagccatgctagctgtgccatattttgtttcctcccagtgttcattctagaacataatctgtggaagtttgaggggtgcaaaacaaaggcacatatctctaggccaaaagcctttttctatactggaaggtatgtgtctgataagtgccctggcaagccatgccaccgggatactggcagaggatctttaggtacttaaatgttcagtaaaatgtgactctgggtctcctcctttctggtcacactagagccctgtctctgtggcttttccacctctaagatgggtctggagagtcagtaaattcaatatgcttttggaagctgaatggaagatcagagaggagactagagagggacagacagggcagggcagatctttgttttcagatttctgtgagttcattttcaagatgtttctttgcctctgtgcaattgtgataacagttggtatagaggcttcatgccaccaccatcctctggtttgctctggctctctctgcccctcgttgaagttcttggtagagataatattgctacacctttacctgtgccttacactgttccctttgagtagacctgacataaagataggactattagttgagtagattatctgcacacattttgaaactgtaaatatacatactgtcttgctctctcatatattctagcaatagctgatttggcctttgggccatatttcataagctgtcaccattgttagggggcaatgagagctaacaacctcaaggctcagtctttcttgcttgatctaccagtatttccctcctgctggtcttcctcatcccagaccacaactgtattagatagcatagtatagtacaatatttattaatgtattatttggccatatttgaaattgaacccaggacctaacttatgctgggcaaatagtttatccctaaactaaatacccataccccagtcttattattttaaagtacaaacgcataattgttgacatctcattttaaagaaggagaagatgatgaacatttgtgttgttctcttggtttctaaaactcactatgtagttcagattggtcttgtactcttagcaacccccctgtgttggcctcaagggtactgggattataggtctgagtcaccaggcccagctattaaaaaaaatcttttgatgactttcctgacaaccagtaacttgtcacgttaggaagatctctagctttcacttatcaatgtggcattgagactccttcacagtttggtctcaatgggcttctgtagttagagttttacagacatttttttctaggtttcttccaaaacagttcttctgatgtatacattgatgtgatatttccctgtgacttattctttccctagcttcttcaaggtaattaaaacttacctatcagtaacccaggcccaaaggtccaatctggcccttcaccttctttcatgggtgaacttccacttcaatgcagctaccctcattcattcacctactgtccctggctacatttgggggtcacagcaaagtggagtagttccaacaaaatttggttcctgaacaccaaaatacttaccatctaactctatcagggagactttagctgacgctgatttcacagttcagttttcaagtatcgccagctctggcaagctgtcttggctggctgtacccaagcctcaagtcagaattggtaagtctcctctgaaagcctgcaaaagcccagagaaacccaatgcagggtagctttcatgagtttttatagaaacgagtggtccttgaactctggtcatacagcacaccatagccaagaatagtagaaattcagcagacactttgggagtgacatggaaactgtcaagaatatgtctttatggttcattgagcgtatgtttcttcatgcttccttatattgtcgtgaagaatgtaattgtggctgaatagctggttctttaggccactggacaactcttagatcattctagaactgatctctgcttcttgtgaatggaacacagctctctgattctttctgctgacagtcatgtggtgtttgaattctgtggttgatctaaagatgctgctgtcttcccttccttgtttgtcattcggttgcctgagtctttgtgggtagagacgtatattggaaaggcgagatttcactacttccaggatgatgtcctgctgaggtccttccaatccagacttcagcttcctaatgcaaacatgctgattttatctacctgttattcctcattgatttttattcatccacttttctcctaaggaagggtttgctccagctgtagctagttgcctagactactggcttatccctctgtctacgtagagtcaactcacagcttaaatcttgagagctcaggatccctttagaacccccacccacccactttttctatttttccaccccttctgggaactccaatggtaactctgtattgccagggcatgtggcagacaaatgccaccatttcccaatgtttatgatcttcctggccaaattcccatgtagctggtgggagcgactatgtgctcaagtgaggtcctccgacccttgatcctcttgatccaagtgtcttactcagatcatggggaggatgtaaagcaattttttagacagacaccattgcttttaatgttgatatggcaaagtctgaattataaataccttccatctataagatgttatattgttttacatggtgatgaggaagttgtggggaagatatgtcactgatgctgtgggcagagaaacactacctgtcattttttctgggggtggggtagggaagatcaccgagacgtgatagcaaaggaacgcaattaaggtgtttcaatgctaaatcaaggaggaataatcggtagataaaatcagcgtgtttgtgttaggaagctgaagtctggattgggaggacctcagcatgacatcttcctggaagtactgaaatcttgcctttccaatatacttccctacccacaaagactcatataggtgttgagagccacccttttggttgttgcctgagctatttttgcagttcttagagattaaatctcaataactttttgaaattagagtgtgtttctctcggccgagtgggtcataatgttcttctgcttccttggcacccaaagaacagttctgccctcccctaaaccccagagcattatcatgtgatagtgtggcttgagataagatcagggtcgacagaggaattgtcatttttcatttcttgggcccctttgatcccatttggggtttatattttctgagtgaaaatacaaaccctattgcattcttctgtcctttagagtcttttattattcttatttttccccctgttagagatctaatccgagtcttaagtggcgtggccattagttatcaccaccagattcacagcctacctgcactttagttctcttactactgaacagaaacctcccctgatgcacagcaactgctggctgtggagctaccatccgcatctcatgggtacttggtgttaatttatttcacagtttcctttgcagatataatcagacacactatcacatcccggcttctcctctttattgtgttcctttgctatcacgtcgtctcggtgatctcccccccccccccagagaaaatgacaggtagtgtttctctgcccacagtatcggtgacatatcttccccacaacttcctcatcaccatgcaaaaccatataacatcttatagatggaaggtatttatataaacgcctataaggtatttataattcagactttgctatatcaacatatttcccaaatggcattgtggtcaaggaacttgttctccaaaaatggggggagtggggagggggaggagagaatgttcttttctttctcaattgtaaataaaggagaagttaataaggggaagccttgcccctgattcctccatattttgaaatgcgcgttgtgaatctcatgttaaatgatcagttgtattaatagcacactgttagaacaaaaaggagctctctctgttgatgtatttgggtatttactgggtgagttacagagctttgtgtattagaattggtttgtcaacaattagcatgctaggtttttatataacctatacttcaggtaacagaagattattaaacttcaaccagtgggttagaaatctgctgacgggcaataaaattcttacgtataacagcgctggagaactgcagttgtacagctgcacattgaggcttagattgtgagatagatggcctcagatcagggggacttgaaatatgaagtaaccagaaggtggcactgcaaccctataaatgaaatgctccctcccagatggcctctaaatgcctatcctcctgcctcacttcctgccttttctctttctcttgattctcctttatttctctaagatggatatctgaaactctttttgcaagagatatgcatccattaaaacaacacctctcaacttgcgatatttcttttaaatccaatttgcccagtctaatgctcacttggagaaagttccagctaagtaaacattcactgaatttaaaagacaaagacccagaaagcagagtcagcctccagttgcctccccaccaccctcccgctgttgctgagtggaatggccatgtctttaatctattggttatacaggttaattcccacagtacccatcaggatatggagggcatgtttataaagttaataaatagactggattaatatccgtctgaaaataattccaacttgatgctgtctcacaaagaattaccaagttagaatccatgttcaccaatgggtgttgcttttctctatggggccagaagtcagtcctgacacatggcataagggtttatttttatgtcttgttttagatttcagtaaaattatttttagaaaaagtgatttgtttttcaacctgggcattatcaatgagccaaataagactaccaaaataaatattaaatactttttaaaaacataactataggcaacaactgtttatttcttctatctatatgtatagcctattttcaaatttattttttaaaccaaagatacatctttaaaaaaaaaaaaagaaagaaagaaaaagaaaagtacaacatgtgataaatactgccttgtttacgagacagacatttttattgagagaataatttacctattttctttagtattctacctgttagtaacttggaagatatactttacttatgttgtaaatgaataataattttaattcattaactttgagcgtccattaggacatttctgtgctgggcttttgaaacttccaggtataagtggtgggcgctggccagtgctggacactctttgccttgcctgtgtggtttacaaagtgttattaatccgaccaaaccacacagcacatggtggggaagcagttccctgtccaggactctacttccaagaactgattttgttgacaatgacttttcagaaaacaattgtcattagttttcagtaaaagctggtccctgctggcctcccttccagatctctgcccagacgacaggaaacaacaagctgagagtcaaggataggttgatcactcagtaagacatcagcttcctataacccacagaacccttctccaagaggttcagtaactttatcttgccatcagttcccctgctcgggataagaaatgtccatggcagacccctgcacttaggttgtatgcgcttctaatatgtcttatcttggacaaagttataagtgtaactttgtagcagcctgaaggaaattgggctgagctaggcagggtttcatcattttctccaacgagtttacttcccacccaccagaataaaggggaaaaaagtttaagatgatctgacttgctcaggtattgtccaaagtctgtcattcgggatgtgaagttttatagcatgtatctatccaagactctttagctgtgtgctcaggtaccctggttgttccattcacagtgatcctcttagaatccttatattagtattttcaaggtctttgctttactcgttgcttccaccctctggtctctccacactttattattgcccatttctacattattctcaactgtgtgtatccgcagaggaccatgatctttgggcacacagaaacccaggctggtatgtcttcccatctcattcttgtctctaaacttattttctgtgaaggtcccactgggtaagactgactgtctggggtgtgtattgatctctgatgtgacattgtcatataattcttttgtatggctaggtttatataacttgtgtattacatatttgagggtaaatctgtcttgtttatctagcttaacttgtcattctcatttttttgatgtcttttggagatttaaaaggaaagtacaagaaaaagcaaagtcctgaggtttcatttaattattactttatttacttatttattgcttcattcattcatgtatgtatatatgtatgcatgtatgtatagaatgttgggaattgaacctaggaactcgtgtttgctagacagttattctactcttgaacttcatcctcagcccagttttcccaaggttttggttgaatagacaggcatgagactcaaacattggcattctacaaatttccctggttcatttccttggaagccagaactttaatcgccaaagcaaatcagattttccctggcacagcagtctttttttttttttttttttttttccttttgtaaccttctaggtggagtctggtaggaagtattagagagttattttgtggctggctagttatgtggcctttagtcaatggctggctccaattatatttcccacataataggagacagcgttcaggctcaaatcatcactgagcagagctgggaaggtcttacatttaatgaattccaacctcctaggatgggaagtgtcttgctgatgccgcacatgagatctaggccttggatcaagaagccagggctcctgaccacgagaccctttcctttactctgccaagcttgatctagccactaggatcaatttactagtaaacctcaccaggggctcaagtctgtgggagagtcatcgatgtgtgaggtgtgtgtaacgacattagagggacttcaaagtctagttggggacacattagagcaggaaataagttaataacagaactaactaaggagatgacagggagtaatatgagaagagccaagaaagtcttaaagaagacagtctacctcatttaggaacgtttttctggaaagggagagggtagcttgtttcttgaaggctcagtagactaatacattgggaaggaggtatcacctcccccatcccattacttaactaccctgccaatgtatgtctatcatctcatggcccccccaccagaaatccaggaaaaagagccccttacagtcagacagcacacgtttcctgtaatttagagggaacagtggggtttctccatgtttcttcacatctgagtttcatttgtcacagcctcctcaagtggagcccattgaaaagttttttggcttgctttgttttatgacacttagcaaacctaattacttggcctgaacagttcactggggccacacaaatatggctcaaaggccactgttgaataatgcaaaggatgagggtggtacaggacaccaaactcattctcccagttggacaaaggatcagttgcctacgggaggcagaaagagaataggagccaatttaaatagagtgctgagccattaaaggacaatagacaggcaatgtggaggatcccataacagacttccaaattattcctcaagtcaagaaaacagttgtggagaaagtttagcaagagtgtaacaaggggactcatcaatgcactttttacagtttccatccattttcagaatatcactaggacctaagtacttggactgttcacattacataggaaagccaattggaattttgtaagcctccaatgtgtaggtttgaagccagtagggtgctttccaatcctggtacatagctcctaccctccttgccacacagtatcaactgacaattggagacatagcatgccataagaatttgccctatcttgggagtattgtgcttaaacaaaggctaatgaggactgcctgccttgtgaagccagggactatatacagcagtgggggatttgtccagttgcggaacccatatcctgtgagacaacagactttcctagaatgaatacctggtttcctgcaagatttttaaatgtagttagaaatccatggttttgtgggtaaatttctggctgaaaaaaaacaaaacaaaacaaaacaaaaaacaaaacaaaacaaaacaaaacaaacaaacaaaaaaaaactgtcccctacagaattccctggattagcaggatggagttaagcagagcttaccagtgactccatttgtttgtcaggctattaccttgtgatctctgcatcacagggcatctgatctctcagatctctagaaagaaaaacaatagatcttataatgcccagtaattctgaaaccagaaccccaaagaggcctagaacactgtgaaaatggctccatttgtagagttcttatgatgtaagcatgacgcatgacaatagaagtacactccccagaacctgcctcagaagtcccatgtgctgctatgtacctgtaatcccagcattgcaagagcaggcataggacatgttgctagtcagcttagtctagccatatcattgaacttcaaagattaaggtgagagagattgaaaaagacagttaatgctgacctctggcctgcacatgtgcgcactcacacacacacacacacacacacacacacacacacacacacacacacacacactgttaagacttccaagatcccctatcatctaattctcctttatgggtggggttctggtggctaatgatctgagttcagtgagcagacctaagctctgcttctggctttgatttttagtgtagtcttgaacccaaagaagatgagaccagagcactttggaacccttcaagccgaaggatctacaccccacagcttcttttcacagtgtgctgagcaaggaacccactgcacacttgtattcttaaaatgctgcacaggatatatccggacaataaattatagtagagatggattctgagctgaccattcagcactgtctttagaaggttactatgtccttaagaaacataccatactaaatgttgtgtttagtgtaaaatcacaatcccaactgtgccttgcctcccaaggttaaaagcatcccatatttctaaagggctctgtcaggacatttttcactgggtacctgggttgcactaaaaaatccatgcattttgcttttatcagagtttcagagaaatatcgtgttaaccatctggaatacatattagaattctagggcccttgacacaatggactccacagcagatatggtgtttatggatgacctgataatggtaatattaatgatctttatttatataatacatggtttagaaaacagctctatgtagacacagttggattcggggctggtctttagaaggcagaatcagcccaccaagcactaattttaacaacagaaatagcagagtgaaaacggaaataaaagtatgattgacatctgctactcatattcatgtgaagctgtttagcggggagggggaaaacaggaagagggtgagatatcagttaaagcatacgagctaataggaactcgcaacccaaactgaaaatgtaaaccagcatagcagtaactgggagcggtggatgtggggttgcactgatgtctgcaagagttctgacaccctctcacttttttgtttctcaccctgggcaggtggcaagactcaggttccaaggcagcatgatcctttctccactcctctggctatctgacaatttgtaaacccaggaggaagcctgtgttgcacaggctgtccttagcaatctcatgcacacagtgtgaagtgatccaaagaaataagccactggttgtttacctcatagcattctgtggggtggtgggaacagccactcgaatgaatgcccttgagaaatgcgcagggccagggtagggagagggtgcagtcagttttaagagcatatctggaatctcagaagtcaagaacgtcatctaatatctttaaataatgaaaatagaggaaagatcataatgaacgaaatctcatctttttgaaaggatgacctagtaaacaaggtttaatgccagtgtttagccttggaatctaacagggaggaaaccaaaatgggcagcagtaagctgggagcttcacttacccatgtgagtccttttaaggtgcagagagcagtggctggcaccttaacaggggttttcctcatgatgatataaatgaaacctacacagtaataaataaggcatactagaaggaagtttgttttcaggtaccccacattctgttacatttctttatgtctttgttaaatgtttgagctgagaattgccaccctgacatttacaatgatggttttagacaggaggctcaaaaatatcagcactaaccttaaaataagtaagtaagtaagtaagtaaataaataaataaataaataaacaaggatgcttgtatattccacgtcatcactctgtacgctccagctgatgattttattaaggatgcagcaggaaggaaagaatcaaggataattataaattcataaatacataattcattggcatgagatgattttaatgggatggatgctgggttgtctctttcttcaagaaaataacgtcagtgctctgattaaagcccataatctggcctctatgaaatacttgccaaactgatggggtgcattttcttctctgaaaccatctttgataagaaacgcattacaaactcatcagtttggcttcctgttaacaaagagacagcagccgtctggatcattctggattctcagtgaaactgccatcccatgtatcccacaactaacgctatgccagtttgacaaggggcagacgaatccaggagttactatgcgggggtttaaatctatgcggcagctgacggttgaaataatcatctgtatatggctctgagctagccggggaaaggttgaagctgtatattttcagcatatctactctaatggttaatctgttgtcttgtacagggctctcacagggtggacctgcagcacatcctgacagcttagaggaattactcatagaggatgggctttcgccttgactctcagagtatcccggtagatgaatttaagttcgcttgattgaaaaaggtggaactcacctgactcaggtcctcaaaacatgaagggaccaatagggcccatagcaggttgggtcatagggacagtagtgtcacgaaatgacctctatctgcccccaagtcctcagactgtgtgcttcaatataataggactctgacccattgtattgcttgcctgtttgggcaagtgggaaagtatagtgccttttggaaaggtcagaagctggacagatgtgcagaggagcctgctgaaggcatcaacacagattttctgccaagggtcagctggttaatatctttagctttgtaggctatatggtctctattgaagttatgaagttgctcaatattgatatagaagaaaagatgctagggacaacagggaaataaatgttggtggctctggtcacatgtaattttatttatagagactaaaactcgaattttgttttgttttgttcttggtattctcagtagaatccaggtcagccccaaaccctaatcctcctgcctcagcctttgaagtgctgagattacataccttcccatgcctcctagctaacaccattttaatgttttaggaaatattagccttatagcttttaccaatcattaaacaattgtgggctatacaaaagcacatgggaggccactgttgaccctggttatgaagagtcatgagaagaaggcagcttctggtgccaggagctgagcagacttcatccatgctctaaatgacctaaaaacacaaccatcgcacagtagggcttcaaacaaaaaaaaaatcaattctacctttggcctgcaggccttcccatctggttggcttgaggaagaatgtggtgggggtggagggtggggtggggtgggagatggtgattagggttgagctgggtttttttgagttctgtttaagtcctgccctagtttggttcaaatgaattaaaagtggtcttcttgctccggtagccctctttagactcgcctagaatcactcagggatgttcttgcatttctcatttcacttgtatgctcctcccccaattctattgttcatgtctgggtctttttgctgagagggtaacacctaggattttcacctgagcctccactgtactggaggcaatagagaagcctattctaaggtgaaaaaataaaaaagaaggaaaagggccaaaggcaactagatgtcctaaaggagtgcatagtgatgggcaagtacagcagggtcagagttcagggaagataaatgacccgagattctagatgcaatccaattggatggaatttgtgggtaccatgggaatacacagtctatctagtttgattctagaggagtctttattcctatttatagaaagaaattacagtgaaggtcacatggatcctgttaacatattcatgtagttttttttttctctctctcgtgtaggagctgaattcttccattactctatattgatggactcaaacttacataattcaggtttcctaggcattgaatagagccagaaatataccctgtgattaacttctacataacctattgttccttaaagtctcctttcctattcttctattagcactacaaaagccagaaatggaaaatcaccaacaaaccctcccctttctgtcctactagctctccacggggcgggtgcgccctgtgccatgttagtacaatatagccgcccattttcattttatataatgacagattcctttaataacctacgccctccgagctttacaaataaatctgtttcctgttttttcagctacaggttgtgagatttcccagctggataacgtacaggaagacgtgactgttcaattttagggagttttgtatgtttgagacagtatggtggtggggtaacatccttcatcttgtcattatttgtacactaatatcttgccatgatctttcacaaccactttccttgattgatcttagtaaggggactgtgaagaattcttggatactatatcccctgaatgtcagatcagaaattctcatcctaaggatgacttctctatgtcccccaccctttgtcttagccatgcttagtgcccagtctcattgattgactcatggcaattcctagctacaggcatcatccttcatcaacaggtactagcatagacagttatggtacccacccatactatgggttatctgtctggaatttattatcattgcttttcagtcatttctaaaggaccaccacttcctgttaccagcctgtgtatatatgacaggatgctgggggtgggggtggggcatccttctctcatttaggatccattttcccctggtgtccacattataaagacccaaagtgttaattagtccagactccttgatggagaacaggcctttacatttctcagggactccagtcagtcaaggaccttttgtccacatgactctctctgcagaatgacaatgtcaccgggacttctgtggtctgtcttggaggagaggaaaggaagcatgctattattaaccttgacaacagcaattgtgcggtcactgtttgtcctcagtgtttgccagagagcagctgtagatcaaacaggaccactctagaaagtacttgtgtctctctgatggaactgatggtacagatggctcagggaaacgtggcacatcacaatctccccctttctagtgatgctggggctagaacccaggccatcactcatgctaagcaagcactctacctctgagctctgccctgaatgatccggccacactactctttctgagtgtccaatgcatgacatttagatttaaaccaagctgagcagtggtatcaaaaccaagatggctgatcgggccttccatagtttaatactgagggataaagacatgaaacatgaacagtattgagcaggactttctccagtactttccagaagataatctgcctgatcctgctaagatattagttttggggtatgtgtgtgtgtgcattgtaggagagaagaggagctctatatacttttagaaatttctgcataaaggagaatgtcttctttaagttttacatgtcacccctccagagagtattttagatggacacttgaggggtgggggtggggaaaatctgccattcagccacaagggagaaacttccattctaacacaaaatgatggttgtatttaatgttaaaaaacagtgggtaacttttgtaatgaacaatttcattcgggattaatttcaattttcttctctccttattgtttggcagtcaaggttgaagctagagcccgctatcacaaagacccatttatgcacaagaatgcgactcccaattctccacacgtgcccaagccaggtgaaggagtgctgggctttgtcccagtgtttaacagttgcctggtacccctcagcgtttcactgtaacacactaagctcagttgcagaagacagagagctactgtggctttcagcatgcatttaacttctttgggccacaaaatttgaaagagaaaagccattaaaaaaaaaaaaacaaccaaaaaacaaaaccaatggatgatcatgaaaacaaccccactctccgactagcagcttgcaccctgacttcagtaggaagccccttcagtttgatgcctttgtgttcaataccactatgcatgccatttattctaagtgactccagtgtgaatatgacattactaatgatctgctaagtgtgtgcagatgtgggttactccagatgtggtcattaataacgtaatggagatagctgtttgactcatgtttatgagttgttaccttttattacttttctgagtttatttgctttgagctattttttaactccagccaacaaactcacctttaaatctcagagcttcatctccaccccaccccactctgccctccttaatctcttggggaaaacagggaggagggaaaatgcccggggctggaggggactggtggattcattccatgtaagtaacaggctacttgggcaacctgaaagtcacagtcattacccactccacctcacggatccttacaagaagcgccagtggtctctggcataatacttgcagtctggagaggaagacaaaggcaggggttgctttaaaaaaaaatcttgtaaaatatctgatcattttgaagtaagccccagcccccggccaatgtttctggaagacgttgctttgctcttgcttaaaaacagaacgctgatgtgaaggagagcgaaatgttgttacagatgttcagctctgcattaaggctgttggaattaccaccacatcttaaatcaattcccagagcattgtctggaggttatgtcaccgaaataatgaatcctctttagtcaagaaaacgcaaacatgttaaaacatcattgtaagtttaaattaaactccagcgccaacgaggggatctgaagcctcattagacctgcctgacattttcctaacgctgactcttctccccaaactgtaaaactgttagattcagggcctattagacaagagagcgctgggaagttacaacagaacattaagtgttatacttagggatgcgcaaaaacaagcccttgaattttacgagggctcaaagacttgggagagtttggctcctataaaaattccacattagattctcgaacttgtttgtgttttaaagaagctggcaagtcaggtttctttaaaggaacacctcttcattcagctcgtgtggaggcatgggaagatgctagaaaggtagattgcaatgagccagaaagcaggttaagttcaagcctgtgactctttgtgctcccaaggcagtggctcgctgctgcttgaacatgtttgtctttcgtgaaagcgagtgagcttaagtctctcttttgttttcatttctcatgtagtcatagaagccatgagataagaattatatctgagagatcagctacttttcctagaactgctttctgtaaatatgcagacattggtaaaacccaaagagaggataattaaatatattttctgtccctctttgtaaagagaacgtatccttgatcttcctgtgcgacctgagccatgtgaaatgctctccgttacgcagcattcgtatatttaagccggggacattttccatcccagctcttcagggaacagatttccaggctccgagtaaagctttgaacacagttccattgaagtgaacaaatcccagtctaaatgtgctatgattatgatggatgatctctcagactcacaatgaaaataaatagtctcctcgcatcgaagcaggcattagactccctccacaacgaggtgtctccccagagctggcgaacacatattaacttgcagatctcacatctgaggagccatgccagccaacagcagtgactggataaaagggaaatgtgtgcttaaccaaagagggtactttatgagaggcctggagctaatggggaagaaaaagttaagcaaaagaagccagcagaacagccagtgtgagggacgaatagagaccctttccacaatttgccacaaccatggtaatatgcagggttctcaggtaaacccagccgttgtcaactaggctggatgaaagaccttttgggatgttgcactgtgagctcatgaaaggaaaagtatagtttgtacctcccaataaacatcctcatgaactcacataaaaactcactgaagtggtgtactagcagccccccaggtcccacagttgcagtgcaatggtggccccacacactaaaagatatacccttgtattatgcgaaggaccaatgtgagacttccttctgcagcctaagccagaaaaatgcaaaagtatacctaggcacatgtgtgagcacgtgcacacacactcacacttcatctggcctccaattgctttggttgcctacctcctgtcctctgaaagaaagatgaattcaggtcaaacccagagtgcctgtttgccagctgagagatgcatatcaaccctaagtgtttttttttttttttcaataccatttatgtggcttgtatttatttcctttaatcttttaagtgctgtttagtctcggtgtgatttgctgtggatactcatttctgataagatgtgatatcctcccagccacatagtcccagcctggagcgctaagtgactgatagggtctcagcctgagtggagcctagggtgggaggtgggggtgggagtgtagtatggagcaggtgggagagagcctggggttgggagcctttgcacagcctttctgcctttctcaccttgacacaccattttccctttgccttgggtcagtcagaatgaggtaaccccaaattgacagtagaaaagctactcctaagaagtgggagattctgggctggtgagatggctcagtgggtaagagcacccgactgctcttccgaaggtcaggagttcaaatcccagcaaccacatggtggctcacaaccatccataacaagatctgactccctcttctggagtgtctgaggacagctacagtgtatttacatataataaataaataaatatttaaaaaaaaacaaaagtgggagattctgaagccgatctggagtatgcttagattgttcgaatacctgtggtgctgtgtgtcctaaccgcctatgtttatttagggttttcagggaagcactgtaagatgcatgttctgttatgggtcttctggacaatagcaagcagctgagctggcctagccaccctccccaccctcatctaagcctcatacatgttaacatataccaagcttcttttgatgttgtcgctactaatggttctcttcttagctttaaggtaacttccatgcattccgagtttcagggctgtttcctcctagtctgtgtgacaatcaactctaagaatctgaggatcctagatctccttctcagcatcacagctttagcctggactgtgtgggggtggggagagcaggactggaattttatggcacatgcccctggaagacaggctgcgcaaagatgctgattatccagcatctctctttacaaaccaagcatggtgcgggctaatccatctccagcagttattagcgggtagctttggacaagagcagcagactctactgctctgtcttgtctgtgagtgaagcttcaccttgcttagtggcctgtgtggtttagacatttggaaagcagtctatggtttccagcccctcctctccaccaccctctatccccatccgccatatcattaagaggcatcattcagtagccacctcttccttcatgccaatgttcttcaccagcaccaagtaccctccctggcacagcggcagggaggagagctgagctggcctgggaactcttgagcctacatgcactagtgttcctggcccattgggaaccatgggcaaccaaggcctgggatttctgcctttcctcaagattcttgctgtaggtgcaaggattgggaaccagttaagatggttcatttggaaaggcggcaggctggcatttaatctgcttcctcaaatacaacgctgtttctgattttggttacaagaaaattcatttcaattgttcaaccaagcaaagtattaactcttaaccaaaattaactcaagaataatgacgtgatttttttgtgtgtagataaatcattatttcttaccttccttaatatgccagggcatttatatattgttctagtctgtttacagtgcatgctcaagggttggagcataaagcaatattgcttcaacctcctctcagctggtctcactgactaacgcatccagtctttgtcatggggcctctaaagacagccctgcctttctagtgagtgactgagccttgaatgtgtgtcctttgatatcttgcctgtgtttcgcagtctgccctcaaactgttcataatctcacaagctgcctgtatttgcagttgaagatgagcagccgccaaccctgtcaccaaaaaaaaaacaacgtaatgggggcatgaggaactcgcccaacacctccccgaagctgatgaggtaagcaggcccccctcaaccccggcatggtcacttccccagctccttcactggcttccccacctgcccaagcccaggcccagacctccctccctactcagctccatggggggaggggagccagatcgttagatggcttcttaaaggctggagtatttattctgtcagcttgtcagcagttaatgatagagctgaaaaaattctgtcacgaaaaacagtttgaaaagctgtttgaaaaatacataggctttaaagtcttagctgtcaccatgtcctgtctgtgtgtagttactaaacagcagtggcactaatgacgctgggagccaatcagagggactctgtggttagtttgcctgcggcaagactctttctgctggagtccctctgaggactggtttctgtacttaaggccatatgtgagatgtatcatcacaataaaaaatgaacctgaagattaccttccttttatcctgtcaatggaaatcaaatttctgctaattgattttgactgagaaaaaaaaaagtttaataatctgtgggcttgccaaagcaaagttcagaagcaatccagttctgcttaggttaaaagcaatattaattatggagctgggtgtgcttcttccttcctctttccttcctccctcccttccttccttccttccttccttccttccttccttccttccttccttccttccttccttccttcctccctccctccctccctccctccctcccttcttcccttcctctttccttccctccctccctctctccttccctccctctctccctccatccctccctccctccctctctttattgatctatctttccttcccttcctcccgccccccaagacatcatctaagaaacagcgaatgcaacagaatttcaatacaactctacaggttcctgtttggacaaattcatcttgtgtcagctttgtttctttgattgtctcccgacactaccatctgttttctcagacatcctaattccccaacactatacatggcaaagatttcagggcctgtgaaggcagtccaaagggtaaaagtatttatcttacaaatgtaaaggcatatctacaatccatgggtactggggagtagccaagtacagaaactcatgggtaatcctaaaactggagagagggagactggtagattcctggggcttgcatgccatccaccctagactacttggttagttctcactcagtgaaagactgtctccaaagaaaagatggaaggtgcccaaggtatgacacttgaagttgtcctttggtctccgtgtgtgtgtgtgtgtgtgtgtgtgtgtgtgtgtgtgtgtgtgtgtaagagagagagagagagagagagagagagagagagagagagagagagagagagaaatgggaaggggagggggagaggaggagatgaggagggaggaagggagggagagagagagaggggaagggtaaaggagggagggagagagagagaaagagaaggagagggagacggagaggtagaggagggagaggggagaaggagaggagaagggagagggagaggggggagaaggagaggggagaagggagagaggggagaggggagagaggggagagggacgagaggggaggagaggggagagggagattttagcactgtatatcccaaatgttccctcttcgggaactatgtgcctccctgacattgtgtgcctctttcccagccatggaccctctccctgtgattactgggatgcagtattgattgtttctaattcccacttgtctgcattcttgcttcccctgtgtccacctgcctgggacatgtctttcagtactgaggacatggatcctcctggccccttccctctcttttgtcacaaatacacttttccaatcctgtgaaaaaggcctcggagtcctacatctctcctgtgccgccttgctggggcgccactgatttacacgcatgtttacgtgtttacagttcatgggagggagggagggaaggaataaaaggcaccaactgccaagccactgggtttatgacaccagttgtcagccaagcatagaagtcctatttactcacctttaggtaatcggcttatctaatgctgagagttttctccatttaaaggagagaaaagcccaagtgctttcttttgcctaaatttagagaagcaaataaataaataaagaggaatctgaaaaatgtgaaaccttgggagccaaattccctgtccctgtttgctatgtaaagtatgactcgccgctttgatctcgagtaataataattctgaggagttacactgttttcatatgcttcaaagctgtgtcaaagttttgctgcttaagggtacttctttattctgttggctcttgggtaccaagatgacaggtctcctgtaagaggtggaggctttttaaagttgtagccttcagcaaaacatcaaattaccaaatccagggtaacatacttctacacaaatgccttttctgtagatatattataccatatatattaaatactttagtgttacgtgctacattttatgtgcaatagaaagtgatggttggaggtagccttggggggacttttttccataagcagagaaagctagtgtataccgtatcaagtatggtttttacaggactttctgcctgaaggcctttgtaaataagtaatgatcaacagattggctgtgggtttttgaaaagcatgcccatgtcagtttgcatgatgggggagaattttcaaagtggatcttgctttcattgcctgcctgagagggactgagggagacagtcatcccaggccagagctgtctgcttcatagtacatcagaatagctaaatgggggtcaggtggtgagccaaaacttgccaagctacagaactcaggcttctcctgttggtgcctatgggctgctgatcctactaaagttaccatcatctgatgtgctatctcacctatctacaatgctctccatcatggctgagctagggaacaccatccacacaagtggatgatactcctctttgaccttgaatcctccccccccccctcaggtggttagcagtctttatctaatgtcagagacacaggggcagggtctatgttgagtcttctctattttccttcatttccagcctagcaatggaggacccaaccaaaggaccttctggttgaccttggaatgtatagcactgttaatgagacttccaaatccttttctttcagatctcttttgctgatttatacccaaaccttctttcctatttcctcctacctcttcaaatgccccttttctactcttcaggagatgggactccaaggtcttattccttataacagcccctccctgtccccagatccataaagaagctaatgacttgtttgaagtgggctttccagcatggtgccatgcctcacttttgagcagaatcaatcattccgagtgtgggcaggttttagtggcctatgggtggtgatatggacagcttgagagagactcagagcccagaatggcctgagatggtctataatttaccaccttggcttctacaaataaaacagcctccagagtgaggcctttctccaaatcatttgctggcaggaaatgtggggatcctccactaatgatcctgtctccttgtttgttctggtgtcaggctcaccctggtgttttagtggcacttcattccctgtatgatcactacataaatacccgtgtgtgtgtgtgtgtgtgtgtgtgtgtgtgtgtgtgtgtgtgtgtgtgtgtgactgggtatagaagtagtagagatttttttggcactgtacccactgagaagtgagccacagtggtccctgagtcccttgctctctctgactgtcatcccttctttgctggtttcttaactgagagttacagaaagaacttctagtttttacccagatcaccaaacctgttgtcttgttcttcctccctgacggattgctgatttgtaaatccctggagggcaagaatgttgtctctaatagctcagtcaaaggtttttaatttgaagcctcacagacccaatttcatgaacgctatctagaaagttagggaggcaagccaacctgccctgtgatgaacagttaaaacagaacaatgtgaagctgaacctacccctcctgcccacaagacacacacacacacacacacacacacacacacacacacacacacacacacacacacacacacagggactctatagttgaatccccttcagttttttcatagccatatatagtgaattgtgttctttggctcatctctagatggtgattatctgtacctgggctctcacatgtgttcataagtggaactccagaaaggctgtgtgcctcaggtgactgttcatctcccagattaattctcatcccgcaaatattcaatgaggcctactgtgtttaaagcattgtgggaagtctttgagcttggtggggtagaagggagtctagtctttaaaatgagacaggcaagcccatgccacacaatcaagtgagaagggtttatagtgtctgggaacatagaagtactgatgtccctcagtatggccaaggttgatttgtgaaagatgaaggcggtctagtttgccatcacttacaggagatcctcaactgatgttactatctccttctggttctcctgggcataaatttcagagtattatgcatgtaaactcattgatgatcatagctctgtgagcaagtatagctctctcatatggcagatgaagaagctgggacatagagaggtgaagtctatcacatctggggaagtctcatgtcatcagaaagatggaggaaaaggtgatgcttctcagaccactatatatggcttagtatggctacagtgaagggtccatggagtaataggacaggagctgaaaacgtgtgtatggtctggtctcccagttatggacgatcttgcctgttgtaggcatcaggaaactcttgcaggtttttgagggactggttccctaagttaggtgtgggaagtaattttataagggtcaccttggagtcctccctcagggcctttctgtgaccataaatatagagttgtgtaagaaggatcccacccaaaccctaccctctattagagttttctgggtatcaagggactcagagtttgccgttgaaatgtatatcaggcccaaattagacatcgttcctaagaaggtcacatggcattgctaatatcagtcctgagatctgcagagaagcacagacatgaggatttatgtgtggtatatgtcaggtagacaacttatacgaagaaatagctctcacccaggctagcacagaaaatgaatgatgcccaaaacagaggcactggacactttgaggagcgcttcatgccatgagactcaggaatcttaagacctcagtttcctaagagggaagggactatgatgtgaaggaacacattatccctcttgggcactgactgatcattaggtgaaatgaactcatctactcgttaaatcatatctcttctcttttgactcatacctttcatggggaccttttgttatattttctcacatcagaccctgccactgtgacagattctaataataggaaatggtagaatggcctagagcccactcagggttggggacagaatgccaccctcctaatttttccactgggcagaaaaagaaggaaggcagcgacaggttagctaaataaattcttgccctaatgcacaaactaacagcatgtgacagtcccccatgggaccagagaaaaataaatcatgggtgtcatgagtccaaggtttggatgaacttgacacaggaatcagaacaagttagtgcttagcagaaggtcattattctgttctgtcacttaaggggttatagagccaaggaccatgtacattctcctgagccatttcctcagggtaaaggtggtaacttccatttttctctgaagatgatgtgtagcaagtgatgctgtattagatagaaatgggaaacgccaatgcaattagaaccagaggacctgagagggtcccatgttgccccagagtgactagagcctggtatgaacgttttctatagatggctctgtgattgtcaatctggcagaagacagtggctgggtcctagaaaagccacatcccagagacaatgatggcggttaaagagttagatgcagagttgacagattctgtcagatgccagactacacaaagcaggatccgcacaacagaactgaaaatgttaatttcagagagctaaaaggcactcaggaatggtggctagaaccttcctactagaaccagaaccatgagagaaacttgaagtgatatgctctatctttcagaagtattcatattttatactggagttctaagtttcttccttaataacatctgtctggaccactaagaacattatacctaattcctcactgctacgtagttagggcagctagctccaggcaaactccaggcagccttgattgcttaaagacatactttatagtctcttcccaccatgatgtctttcttaatggcatatactctgtgttaactcaaatacactgtctctgtgtataaatgattagaagagcccagaccaagttatcataagataacaaaagaagcaggctcttgctaagcatagatactggaagcatgctgggtgctgggtgtagtgatgctcagagggcagaacactttgaatggttcttgtaaatttgattgcttattgtgtcctctgctggttgctgaaaatgcattgggctaggggtaggggtgcaagatcctggtcctgtaaaagtttagcatctaatgaggcagtcacaaagcccttttctctgaatgaacaactcacacctctgtagggagagactcacacaactcactgaagctgaggaagaacatttgaaccagaagatgaagtctaggaaacaccctgtagttccacaatcataccacaaatgcatctgccatttagatggaaaggttgtgggggcactgtgttcacattttaccctgatgcccatttctcggagctcactgcaggatgggttggcctctatctgggagggatgcttgtggtgatggaaaaggcctaaccatgtgatgaagccttaggtcctaaaaggtgaagcagggagaagggtaaaattctgaaactatgtagtaacaacttccttctttcaggaatttcttgggttccacgtgttttaatgtgagcttctgaagtccagtgttgaactcaaagccatacagtaaactgggttttgctgcctttggctgtaagcggaactctcctctttaaaatataattcgacttcctcacagcaggtttgcctagcaaagggatttgcggtttagctttaggctcttgtcttcaaggcaaagctttctgtgtttctgctgtggcagggcatttagttcacttcctgagattaattgatggcaagtggccttccttgctctgcacaccctcaaaacaaagatcttttattctcctcttgaagtcaggcatgcttaatttctagctgtggacattggaggaggtaggaattgagaggtgaggagcaaagagggggggagatgcctaactcactgggactgctgtgttagaagtagtgggcattcctaaaccagccttcagatctttggcacatgacaaagtctcacacaagccttaattgatttttgagccactcctaagcacattgtcttgacaaggggctcgccgggataattttctactgagcattcatgcaagctgtgcacttcatacatacccttgatgctgtttgccctctctttacagcttagggcattgtgacttgggctgcaggggagagggaacaagacacagctgcctcctgctggagaggggggacttaggggaagggggggacttaggggagaggggacgaacagtaccggcttctggtcagtcagtctttcaaaggataatcccgctgcaccactggagctattctaccaccccctcttctcacaagcacacactgtttcccatccacacacatgggctattaataaccaaaaatgcctatgagtattagtatgatggtcaaatgacaaacagtggggggggggaggcattttaacatggtaacatttataagatttcaacttatgggaactctttgtcatggcagtaggagagccgacagagtgtcctgtgtctttctggctggccttctccactttgccttcttcctttgaccataatccgagccaccaaagcaggactggattctaagccagccataaagaacagtagggaagggagcagtaaacacttggtgaagacaggtctgccgagctccgggctgtatgcatgatgcgcctttccttgtatactccctaaattgattctatttgataatgattgtactttacatttccattttacagattgagaagctgaggcagggtacagcttgccaagtatgaggcaaactaagatttgaagacagatttgcctctggggctagagtccccaacccaccatgtgaattgctttggaggaaataggggtagtttcttgccttaaatagtattgggaaaacaatactctcagttgataagactgactggctggtgactagtttcatctttcctctgggttaggctgtcaactgtattcagtgcaggttaaagttcagtaaacataccactcaagagagccctgtaatcgacagtaggaaattcctttccctaagttctggaggctaaaagttcaaggtggagacttcagcaggactggttatttctaagggggaagaactgttttagcatctctttccaacctgcagatctttttttcctcccatgatgttactgtgaatcttgttctatcaacttcagagtccagatttccatcctgtatatggaaagtcaaaacgggacccacctcagggatcttagttttataaatagcacagctcaaaatatgattatgttctggggtaggcagggggaagatctcagcatgcagattgcacagctgggcccccaacagtgaagcaacagctatagctgtcgcccagcacatatgctttctgtccctttaaaacacaacaagaaccctggcaagtcataagtggcacgtgggcattgaatttcatagggaacatcttaggagagttatggaatgacatgtgagtagaagaaatagccagtcactacatgaaagggactagtatttagtgatgctcagcagctccactaggtcttaaagagctcactggaggcctttgcaagctggagatatcggaatgccctgcacagagacttcccatgatcctcccctcatgcatagcaacctgcctgcttcctcctgattcccttggaccacactagtgttgagcgttatgctccatgacaaacacatggagctttttctagaaggacaacttggaaaattcttgatttaagaggtggaaatccctggagacacccactccttctcttcccacccgtgccaggggtctcatggcaggcatacaccagtgaaagacactcgaaattgctacaggaactgacatggtgaagaaatccatcatggctggcccaaagtaatcacgtagtctgatgtcgctgggaaaagtcacactctgagcaccaccagcccctcacagcagaatctagtgagcatgacctttaatggacctgtaagtctgttagtcttcaatgctcttcaccctaccccaccctccaacaactgttccttacctagccactaccttctagcctttcacagcctggcactgagccaatcctttccagatccttctagctacttctcttcccaaggaggacccactgcttcaaacctgaaggtcctctaggcccaccagcatttgtagttaaattaccactaatagtgctatctcttgtaccttactcaaaaaaaataataattaaaaaaaaacaaaacacccaaacctcattttctatcttatatgacatttttcatttcgggaagcatggtgtcgaatctacctgctgtcatgcattcgttagtctgttgttcgtatgagtcagtgggctcatcctctattgactgccagtacatatctacgaagctctcatacaactgcactgaggtttctgtgccttaggtcaagcaacaggacactggacatttccagtcatctctgttgggaaccattttgtggctacttaaacctcacttcttgagtggattctaacagctgttggtagaacaacacagaaatgcttatctttctcagcctaccagttattcccatggtcctcctctcaataggccaactgttgctggctttcccatcaacccttcccagacgccacgccagccaatggggaataagcatgttctttctggaagccttcacattgtcctgcatatgataggtatctgttagagcatgcacatgctagtgtgccgtgacctttgagctatattttcttttttctgctacatgtgaatctctatttgacatcactacaccttcctttcctggctaagaacagagtttattgataactcatgttgattgattactgattaaagaaaccaaagttggagattcgggtgccacatctggtctgtaaagtaaatatctgcgttcagggaaattttctgtgtttctcaggtcagacccttctggggaaatcctagatgatgtatatttaaatcatctaggcctgactcagtgacccatgtggagggcagaatatctgtggaactcctctgagattggctgcatgacttgacatgttagagcacaaaccatgtctccagtccctagagttatatatagctgctctccctgaactccagtcttagttagtttataattaacactcactgccactttttcccttcataataatggaaaagatagatgggaccatctatctttcttttaggccactcttactacatctttctgaccaaagaacaagggcaagagaatttaaacttgactctgtcttcagggcaggtctaagattctcttgtatcccaaaacatgttcttcaaggtttgaaagagactctccagctccttctctagagtagctttgtccacctacctaagacagatgttgaatagagaaccgtcaaagatttctcaaagttgaataagaaaagctctcatttactaaagtgtgtgtgtgtgtgtgtgtgtgaaggcaaccacagagggtcagttctctttatacaccttacttggcttctagggatcacactcaaatgtcaaatgcttgcacaggaagcacctttgcccacggatccatctcagtgaccctgattttggcacatttggcctcggctttatatgtgagaggtgtcctggtagcttacagcaccttaagacctgtcaacagccgggctactgagatgctactctgaattgggttgtcctgactctttaaagatcagctgtgacagttgctgcagtaatctagcatgctccttgaagatgacaccacaggatcacatcacaaggtattcatcatttgctgtggcctcaaagcaaattgccgagaataaaaacactcagtgagtttgctgtcttctccatgtgtggaaggcataatagacaggtcatgctagatgtccaaaagcttagtactttaaaaaaattgctgccttagtctctatagtcagaacaaaaaaaatgagaaatattaggtatttctcagggaaaaacattagtacataaataaagattatcctttaaatatctggaatagatcattttaaaggtaacatcacttcactatacaatattgaaatttaaatctatttctatttttggtctgtcttggtcgacagtttgcttaaggaaattaattttgctgcaagataggtctgcctgggatatcttaattgtacatggtccttgttgtagaagccaatgagggcttccaacatactcacatgctgacaatatcagatatagagtctcagacaatgagtataagttggtctgtaaggcttgtttcttataccatgggcatcgtagagttgcctgattttattataattccttgggttgtcagttagaccctgacatcccactgaagggaagacttctatgcagccatacttccagtgggtgtagccttgagaatttcaaacaagtttattaagatgcatatgagctggaggctctcatccagagaataccatgttgggaaatgaaggtggagatgaggggcctgtcactggactgttaagcacaaatacagttgtcaaggcgaggagagagggtgttgtttagtattgaaatcatgtattccagatgtggacatttggtagtcaatctgctctgaagtgacacgctgctgaatctttaaagggcttcatccagggagagcaaaatctgattgggcaaattgctaaaatatttaaagtgcagcctgttaaagcttttactgcgaagagcatcgcgtcagaagttgtagtcagaaagagcaagtaattggctttccatcctgatgccagtcagccagcatgaggctctattcctattcctccctcttcattgccaatgctaatagcaatcctttggtgtgtgtgtgtgtgtgtgtgtgtgtgtgtgtgtgtgtgtttgtgtgtgtgtgtgtgtgtatgctggggaaactggatagttggtaaaatgagacaacaatgaatgagatagtcataaaaaaggaagctgaaatgtatttatgtatacaaaatagcatgaagcccatttgcaaaatgggcagggaaaaaagcagaattactacctgacaaagtcaagtgcccttccagaggggtccatggacagctgcctttcaagggatattctctgcaggagaggagatggccattggtgacatccactttctcagcgtctgtcatctcctctgagatgtgactctgggggaccctttgcatttataatttatcacattttccacttaggttttcctgccttttctccccaggcatgaccccttgttaattcctggcaatgatcagattgacaacatggactccaatgtgaaaaagtacgactccactggaatgtttcactggtgtgcacccaaggagattgagaaagtcatcttggtgagtgaggaaccatgatgtcgacgtctgtctcctctgcctggcatgaggagtttgctcagagtgcagatttccttaactgaatagtagaggacactgtcacttgcaccagaggctgaagcggagagatctctgatcagaacatgaatttagggcagagttgttttctttttcctcccaagagcagaacttccaatctctgcatttttatcagaacaatagtggtgattatgtgtatgacaagttatcatgggagatagaatacacatcttcctgatcctcatatggctctgggagcagagcctggtcctgtcatctgatagttgcatggccttaggccagttcttgaactctgcattttaattatctcatctgtaagaagataggatgagaatgaccccagcttatgtaagattgtggtgcaaatctaatctctctgtcctcagaggcacctttcttttacctgctgttattatcatgattatttgtaaataccatgaagaaataggagttattgctgggattgttatcttttgtaattttgtttcattttgttttgtaacatgtttgtattcatgggcttgtagtaccgcatccagccttttctttttaccgggggtaacaggaatcaaactcaggccttcatgcttatatggcaagcactttatcaactaaaccatctctccagacctccagtagtgtttcctcccctaactaacttgttttcggtccttcttaacacatgatgcagacaggcaagtgcatttgctgagcgtgacattgcaagactgtggtccgttgtcatggtgcagctcagatggttgcttcaagggaaggctttagggatacctttagaaatagcaggtttctctgctctggcacaggaaagctagcccagacaacaatccattccactgtctgcctttgtcctgttaacagctttagggtttatgcctacactggcatccctagaatttattgtcttgctaatccctgaaatgtgggttaatagtcaggaaggctggccagactggattcttctcccttgtgcctctaatccccagatggctgtgggccttctccattttcaggtagggaaattctatcattttctatttcagggccacctttcctttaacaaggacttttccagatcctcagagtggttctatatgttaagccactagatttctccactccactatgctttaaatagtgtgtgtgtgtgatttcaaattaattataaattagcattatgagccaatagaggattgtgctggaagctatctcagtttgcaaaaactgcagacacaaagttaaaatgctcagccaacagtctttatgtgatttgccaggaggtgagatggttctaaccgcttatacactctgtgattggttaccagtggcttgctcacatctgaataatctacatagagtgtagtgtgatatgtgatcattatccctttttagaagaaaggaatttaggaatatgagttcatctgttcaaacagcatcagttaaggaaacatttatagtaaacacactatgggttaggtactgttcttgttctgagacatgacgcacagggctggattctagtaggccaaagggaaggccagtggggtggtgaatgagtctgtgagaacaatttagatatgaatgaagggcatgatcctgggaaggacagagtctagaggtactactgaggcaacaggatcgcaggagacctctctgcagtaatgaatagatggaatttttattcagtgcatagaggagaaaaatggagggctggagggcagagatgtggaagcacctgtgaaagatgcttatggaatcgatctattcactgagggctttggatgatttggaaatggaagagacagtgctctaattgaaaaggagataaaaaaattgaaccctgaaataatctttttgatgctaagtggtgtgagatacaaagtccgcttcagatccatggaataagcaccagtctggctttaagatagccagcgagtcccatcaagtccagataggttctgattaggagggcctcaagggtgtatggggaaactcttgaagggattttctcttgggtcttaatcataggcaagtcaggctctccaagtttgaggtacaggactggaactttacacacttctctaggggatgtacctgtggcatcattgagaactggtatttgccccagatctaagctcccgaggttagcttctgtgcctgaaccattctgccaactagtatctagctaatttttggatcctttgatttcaagtttccatcctccaccccttttgtacttctctgctgaggggaaccagattcttaggtgaccaggccaattgaaaatattaaggagccccactcataacacctctctgcttctggctccagccactagtacttctgtgaggccaaagaactaacttcaggtcttccccacaaagtggcaagaagtgatgggagctcttggggagcctcttgggtcaccttttgtgacacgtttcttccagcgcgtgtctcaagcttccttagactctgggaaatcagcaatgatgataggttcttctttattcgagaaatgaaagctagcttcctcctctcctggttttttcttttttttttttttaaataaccctgacaatattgtgaatattggcgtttaagcaatcaatacactggtcagtgctaaggattaactcaagcagaagctggtatgtccagtggccattaatatgcctctgccaaagcattgtaacccactcgggaccttatgagcatgtgctaaggaacgggaaagatggcaggcagggtgaaggtgttgacagaggagaaacaaagaacgagcccaaccctgacctcaccctgttgtccttttcacttgtataatgagcaaacggccagtgatgggcagatagccatttgcattctgggtaactggggtcttcccctacataggagtattccttcctttgtcatcttcatggatacaggtctggggctgggaaaagacattagtctgtgtctttattgattggctgctagacccttatcatgactatttgtgggtttttatatgaggcgagcccttccaaaaataatccaggaaaccctaaagtctgaacacagggtcaacatgctttttctgtagaaggaaatattgagtgatttaagtctcagaagccatatgatctctgtctcaactgacaactcttgttttccattaaagcaaccatggaaaatacctaaatattatgaattggctgtgtctcaataaaactttattggaatgtgaattttatatgatcatcattcatagtgacatttctaatgttgatttactttttagccattgtaaattttaagaaccagttttaactcagtggacatatagaagcttgtaggtttgtatcatcagattgaggctacagaccacagcagccagcctatggtttcagatatcacattcgatctactgagacagtgaggggtatgccaccttactgaaatatctaaaaagagcacctcaaatttcacctgagaccaactaataatcatcttagcaaaagggcctaaagggatctcattttatcatccatttttctctttctctctcccttccttccttccttccttccttccttccttccttccttccttccttccttccttcctttctttctttcttccttatctctctctctctctctctccccctttctttctgtttttgttgttttgttttgttttggagacagggtttctctgtgtagtcctgactgtcctggaactcactctctagaccaggctgtcctccaactcagagatctacctgcttctgcctccaagtgctgagattaaatgatttatcacccatatttatttatttatttatttatttatttatttatttatttatttatttatttatttatttaggtttttcaatacagggtttttctgtacagccctggctgtcctggaactcactttgtagaccaggctggtctcgaactcagaacctctgcctctgcctctgcctctgcctctgcctctgcctctgcctctgcctctgcctctgcctctgcctctgcctctgcctctgcctctgcctctgcctctgcctctgcctctgcctctgcctctgcctctgcctctgcctctgcctctgcctctgcctctgcctctgcctctgcctccggagtgctgggattaaaggagtgtgcacgccaccacgcccagccttatcacccatttttatggccactaagacttcctttttttccacatacctaaacatcccccttttttgtctttgttctcctaaagattcctacctcctgtctcctgttcacaggtctacatggtatatccttcttaaacctattgttctagaaggtagtactgtgtgaatatatgcttacaggaatttatgatataaatagaatatatgcccctgtatatattacaggcattagagagtatataacatgtatataatggcatagtaaaaccaatagctgtcctgtaaaccttactggtattttactttgatggttaatagaatcaagaaagaaaaaaaacatagtgccttctctacatgtatgcttgctgtatgtactaaatttattagaaagatttatttgttctctaacatgctggacatggagttttcaaccagctttcaacttccaaaaaaaaaaaaaaaaaaaaaaaaaacctggtgtttatagcagcccacatggtgacctgagttttaccttttttttccagctccccactttcctgagtagactttatccattagaataggtgccttgtgcaattttatacatgacgttgaagaatcacttcttttctattattctgaactaaattaaaccttttgttttactacagtacaaataatagctgtattgggtacctttgtggtattataataaaaatgtctgacatagctaactcacaaagagaaaaggtagctcacagtttaagaagttcgaagtctaatgctgggctgccccaattgcctggtctctggtggggtggtggatgatcatagagtgtagaagcaaacatgagcagagagaaaggaggtgtgtccatgtttgttcttctcatactgactgtctttggagaagacatggatcaaggagtcacatgaaaactcctaggcagttgtacataaactgctccacactttcaataatctaaggacctcaacaaggctttaactcaacaaagctccaccataaaataatgctattctaaagacaaagactttaaccacaaagggctcttgggggacactctttagacatcacctaaaccacagcagtggtccacagtaggtggtcaatgagtgttcgctttcttctctgcgtaagtgatgctttctccccttataccagtgttgtgagcacttctttctaaaactcttgcaaccctctctgtttcagactcgaagtgaagctgccatgactgtcctgagtggccatgtcgtagtctgcatctttggggatgtcagctcagccctgattggcctccggaacctggtgatgccacttcgtgctagcaactttcactatcatgagctcaaacacattgtgtttgtgggctccattgagtacctcaagagggagtgggaaacactgcacaacttcccgaaagtgtccatattgcctgtaagtcaagtcgcactatttaatgtccagttcttcatctttacattcaaaagaagaagtcccaggtggctgtaattgttgaggctttgatcgtgtctctgctcctttttgttgctacaggcctgaggacatagctgtccttcccctgtgctctgctaagaaagtaaaaccctgggaggccttattaaaagaatttgcagccaagtgcagcctcttgtcgggtgaagttgagctaccttcacacgcactagcttaccattgtctaaactctctttcctgggcaaaatttagaacgttgccctattttgatatatgcaccaagaattcactcataaaattattgttggcattttaatttgacatggttaatgcttagagaaacacagatctgtcccatctttcatctgatattggccaaataaataaagagcagatttatctctactgtatggaattccatacctctgctctgaccagcctctattcactctttgtctagaaacccagaattttttccatggctttctgtgtttgtatatacatgtaaaagcatgtatccataggtgcttattgattgcaaagatcacaggacaccaatctataaaagacaatttgggactccataatttagtgtgaaaataagggatgagtgatttaaaagtcaaatggatagtaactttctaattataatatattctccacaaaattttagacttaaagaatattaattcttttcaaagttttgtgtggttgcctatgtcagaaatccagaaaaacattacctatccttcaactatttttattatcaagtcatacctaaaatcaagagacatttagccccttagctgtcaagaagtttgttttctgcaactttttatcagcttgcagaacagcagaaatgcagccacaagagccaaggaatataatgtgttaaagggtatataaggggctatccacagtcaccacccttatgtgcaacatgtgtctcccatagtgcctcatctaacaagtctcttcatttccaaaaaatgttagacagaccaaaccctgactgctttaatgtatacctgtagttaaaggtggtcacctgttacaattcactcatcaaagaagcatatctgcatactgtgtaaccttcactaaattcagaaatatgaccaatcgatttgattatacctttctgtggttatcactatcttatgtgtcctattccacatgacccctttacctctgaaggtatctctgtaaaactaatttgctaggtgcacaggtacatatttatgtaggaagggcttgtgtgtatttgtggtatttgtgcgtgtacacacgcgtgtgtctctgtgtgtgcatgtgtgtgtgtgtgtgtgtttccttctgtatgaccctattcacatttcctcacctgcctctgcaagtcaggatgagtcttatatttgtagagcctttataaattcccccatatttagcatacttaagcacagtgggcttgtacattataagccctaacccctgtcttcattgtttaaactgtgtcattcctataagggtatccgagagaaacaaaagctttatatatatgactttggtattttttgtgccttgaaatcatatgcttacaactggacgtgagctccttcagatcacaattactgctgactttcctacaaggtgaaaattaaaagaacatggacatcgacagctgatgtttatacgctggcaatgtgatacaaagagttggtcacacttaattttgtaccaagctaacatagaagacagtgtttttttgttttttgtttttttttccttctccagggtaccactccagtgcctggatcagtttatggccccaaatgccctttctctatggctcaactttacagcaatatttaggagcactagaatagaatcatgacttctactgcattataaagaggagctaaagggctccatagttatccagatcctaatttcccaaaccccatttagtgatggggacaaggggagatgtatacagcagctggcaaacacttagccactagaggctgaggctgaaggtaacttgtgtatccatatacacaagggaaaacttaaatccatctagaggatctgggatgcttttggctgcatgagacccccaaaatagtgccgtgcagctgctggggggctctgacatggcatggccctgtgtgcaagagtattcatccagtctatcaaatctaccttacaccccattattaaccttgcatctacagaggtttttctactgtctcacattgttataggatttttaaaaactctgtttactggcttatttatttttaattgcaccggtaatatacaaatctgttcttgttataaaatattcaaacaatatcagagtatgtaaagtcaaaagcaaactttccactccattctttcctctcccagaggtaattactgttattagtttagtgtatagtttttcccgagttttctttttgaatttacatatatttataaatatataatttttacttcaagtagcttcatttattccaaataaatggagttatactttttaaatggttcaagatactcacattcccaccacttactaatccctttatcttggagtttattccaactcagtgagtttatggaagactcggatgtgcctatagtatacgtcctctattgtatatgtgtcccaaaataaatttaactactctcatgttgttagagcattgtgtcctttccttggcatttttttcttactaaacattatgcaataaaattttatggcccgaagcttgcccctttgcctcgcccttgtacaaaatgcacactaactccactggctccctcagcctcctgattgagcagagccatgagctcccacctcctcacaccctgctttgtggatttccccatggctgctttggaaattctagttggatacgctgtctgttgccagagacagaaatgacctgctattaaataaacaggcatttgaaacccacctcctcgttatgttctgaaaggcagaggttgccacaggacagttacttaaatcaagacaatttccaggcaggaggaagacgtagaccctggcattattcgtctcgggtttgttagtaatagcttgattgagtattgagaactggcctgaaatgctgccatcagcaccaactaccctttagattagcgtgcagcccttattccctgaaatgtagttagggcagcttaatgtcaagacataaaaaagatacttgttaaataatgtcccaaagctcctgcccaatctttaatttgtttttattttttctctttccctcttctctctctctctctctctctctctctctctctctctctttctctctctgtattttcatattctttctctctctccctctccctccctctctctctctctctctctccccctaccacccccatgccaaagggtacaccattaagtcgggctgatttaagggctgtcaacatcaacctctgtgacatgtgcgttatcctgtcagccaatcagaataatattgatgatacttcgcttcaggacaaggaatgcatcttggcgtcactcaacatcaaatctatgcagtttgatgacagcatcggggtcttgcaggctaattcccaaggtaaggacagcctataatacttctctgctgtgcctatgggggacaggggctggcaagagggatatccttcactcagtaattcaaagaggctcacatcagcctgtctggcaatgaaacctgtggtcgccacgatggcttacagaggagcatctgttcttcctgccatctaaagatacagacctgaaacctgatgtatgtctccctcccccagtttgttgccttttgaggcaatagaagcatctttaaatgcctactctctctgccttttcaaacaatgggctttatgaccagggtcactgtctaagagccagagtaatgtataaatgccagctgtacaatttccttctctttcactatgagtacttttctatggagctaaaaagggaatgttaagctttgctatggctagtgtcacatgcaagactctactcgcctaaggatggagatctctaatgatacagacacttgaagctgtatagcaaggagtgatgcttgctggactgtacattttcctatagaaggcacgggggcctgaaatggcacatagctgtcttctctcttggcctcaatcttccctgtcatttgttcggagatcctggacaggtggttataagtgacgatgtcatcctgtagtctcagggaagcggcacagcaagtaaccccataatgaatgaccttggaaatcaggagagagaaggataggagaagaaatattttcttctgagtgacagctctatatgggtcatgcaaggcttactgaatgggagtgattgactactgaattgggggcctcactcccattattccaaggagcaaaggccacgagagttgtaggaggcaggaagctcctcactggtagctcggcatcaggagcttctgggagcttgactagatcttggggctaagaccttgatgctctgctgtctctgaacaacctagcattaccacccatgcctcaactccgctccgcattgccagaaaaccaaagaccctagtacctgaaaacccctccattgcaggttctcttccttgcactggccttggtggagagctagcagggagtggggggtgtgggactgggtgggggaggggacaggcaccctgtggtaggattggggtaggtagtgaaagaaaaggagaggcctaaatgcttcccagtagatccaggagccactgtgcagttcaaagccactctcaggggagtgtcagccttgctgctgtggaccagaagaagaggcagagccattcttggggtccctagcagctttaggcttttgctgacttgtgcttctccaacctttctgagagttgcatcagtctgtaatacttaccgagtcatgcccagcttccacttttctgacataaccctgcctcaggcctaactttggcctctccatcccatcatcttgcctgatggtcgaaaatataaagattggtgcagccacagaagaaaagaacaatgtgccaaaacccaaagagacaccctgagttctgccaggctgtatgcataggaaacagaacttgcctcctgcccagcttgcccagagagcacgggagaaggaatgtggaaagacagtgagctgaccttccaggggttggatgcagctagctggtatgtgttatcttcctctaagtccctgctctttaatttgtcttccccattctcaccctgatgtgagcatcacctggggcagcttgttggaaatacatcttgccagggcctaccttatactacctgtcagatgtgcattctaatgagatccctgggtgactggtacaggctgttctaaagcagagcatcgaacatgctgatcaactctttcagacatgcctcctgtcctggagagggaagagcaaagggatgggaaagatttgtgaggagcacttctcccctgggttagagacacagagaacaggagagggcagggagtgctccctttctctggccgacctgtgtcctcccaatatagtcaggacttcatggtctgcagacatgtaataatacaccaccacgtacacatgtatacttgaaatggcatgtgtcattttctttctcaccctatcttctcctatcctgtcattggcctgcatatcatcctctggtcccactctggtattccaatgacaatggtccagtggtagttcacagcaccaagaactggctcttctccaccactcacctctagagcccatgcagtgtgcacttctttgagttctagccaccggatagagaggggagctgaaggtctctgctgttccccacctctaagatctctttgactagctggtatccccagtggcctcagatccttgcttctccatacaggtatttggaaggtccatactccaagggagcggttggagtcacaggcaatagaggcaccgcattgttctttgcattttggacaacgtatcatatgtgtccttaatgtaaactgtagagtttcctcacacctccccaccagtttcatcttgatgaaccacatggtccttgacaaaagcctcacaaactcctttacctatgcacaagccacgttttgattcttccagaacccagctggctccagaaatgtggactgaggacagctggtctgctctattgtggagtgctcatgtgaccatgtggaagctgttttaacatgctacagttgaccaggataagggcccgttagaacagcactgagaagtccagccaccatgggaaggatttgcgtctgtgtctatgcccttgccagggcatgttactgggactcctctcttttcccctttgcttctcttctttagtgtcacttttctagcccacacggtgtcaggactgacccagcctagcgattctggaccagagactttctgaaaggaaaggagatgtcatggctgcttgtcaaaaacaattacagcagaaggcggcatgttccatgtgggccggtatatccgatgtgacatttgggtctatgagatgcagttttaatatacagcaggcaaaaccgcactgacagtcacataaagcaggtgaagctgcctcttgctggtcagcaaacatcagcgccgagccactttacagctctttaccagcgactaagtgcctttatttgcagagtgcctgtcatttccctttggctggagagctggtgtattatttagcacgcatttatctagggaaaacacttccatttaaatcagctggtacaatagtgcctcgttgccagcccatttccctgtggtgctaaaagatgagaaggaagtccgatcttgggaagagtcagggttcattcccagagagcctctgggatcagcacctaaaatgagagatgtggtgcagtcgctctctttttgttgttttgttattttaaatataaaaaaatgtgaaatgagcatcttgcaccttattttctcttccagtcaaggcttctcttagggaagagaaaggaaggcaggcgagtcccccatgctccagccactctaaaggacagcagtgacttggattcagccgctccctagcagcaaggaactcagggagtggaggacaatgacaatacagagaaaagagggctgggttagcagaagagggacccagagaggggccttatttcatctattcacacatctttgtaagtcctcctaatagaggcgacagctgggcatgcattgaatgcaagtggctattgagcccttgagataggcctggtgtcaatgcaatggaggaactgaattttcccctttcttaacttttaataaagttacacttcagtagcatcaactgctctttcattgctaggacaaggtatctgacaggaagcaagtgaaagaaaaaagaacggattgttccggctcatagttcacagggagatatactattgtggtccggaaggcatggcggcaggaataggagaccagttggtcacatagcacctgtagttcagatgcagagtgagcaggaagtgggatcaaggggatccagctataaaacgtcaaggtctgcccccagcgatctctccccagcaaggctaatggttccacagccttctcaagaagttacaatcagggacaagctagtatacatgtgagcctgagaggggtagggcatttctctcccaagttatgagaaacagttttccacagctagcggctgtataactagacatcttactgtggggagataacttttttgacttgctaagagttttgatttggggatatcatccaagatttgtcagaccagggcaagtatacatctgtctttgaaaaatacagcttgaccctagctaaaggtgagtggtgggaaaatgttccagggaaatgggttgctgctccctgcacagctttgtagtgtcagaatgaagcaaggcagacatggaggtgaatttgaagtataggagagatggttgctgaagacagtggataaaaacaaagaatgggtcaggagctgggttttgagattggcgactagacgatgaccttacaactaaggaagaagacaggaccaaggaggagatgtgaattggggacgaaggcaaagaatttagtcctgatcactttgcacccgtgaggaccacaaggaaccatgaagatggcctgcacagcctgcaggttaattcattagtgccgctgtgaggagcagtaggtgcttcggctttagatggaggctgatatgaagcgaaggactccattctctgaaaggatgcagatgctcttccacttgtcctggggtcatatcccagtcgactgatgagagttgaaatagcatgccacaggccgtggagattgctccactggtactagaaacagtcgcagcagaaacctgatgacctgagtttgatccaggacctacttaaaaagctggatgcagtggtgcatgtccatgatcccaacactcctatggcaatgcaagaggcagagatgggagaagcagctagaagttcatgggccagccagcctgaactatactcctgccgttgattgatgatccctcttttctttgcatatttttggatcatactagctttctctggacttgaaaaaactcaagaggagtaaaaagtggcagggggtggtgtgggaatcttttgcccaaaggttccacttgccaacctggcttctgtcacgatctcaaagtaataagtacaggtgtcagctacccagcacatagctttggaggtaacccagctaagatccaacatttccttgatgtatgtcccaaagctagcaggatcttgtccttgaggcaagttgaagtgggggaaagggacaaacaatggaattgtgggaaaaggacagccagaatgaggaatgcctgaatgagccatttaccaatggttaagaccaggaccaacagttaataataaaaagactaggttttccctttaacataaggaagtcattcccaggaaacagatcaggctctgcagagattgggaacattctaccattgtgtactaaagggaagttactggccaccatgatctctgtgatgagaggcagattggatgggatgagcccagtggtccttttttaactgagcgtctctggaattttcttggtttttattatacagagttctgcattttataggttctgtagccttgctccagagggagagctgtggtgtttggcagaactggggtcacgggtctcttagtggaagtgttcacatccttcctgaacggtgatggcagtgtggccagtgccgggtgagcacctacacatctggtgtttccattagagtgacagaccaccccattcccaactcccatgtcactcttcaacatctgcccttcccactttgtgctctcctcctcctctgagcctggcttcttgtacatgcagactaccgacacacctatgcacgtttcttcccacccagcttcactccctgaaatcagagaagcagttttttagctgctcctgtatagcatttcattacctcaatattctctctcaattctaaaatggcagtgggggagcgccatttctctttatgcctactgaacgaagaaagctcagcactaaaatattttccttccgttgtagctgaaatggctgttggcttccatcccaaaaaccagaaagacaattctacttaactgtttagagatttatacataccacactggagtagcctctaggtagtaactttagatacccagcccaataattttcttttattggcttgtgatttagatcctatttggaatcctccataataagagtagtacatttcattaaaaaagcttactaaacaataaaagaaagtctggcttagggctctgagagggtctcaagtacagagtggggcctgcgctgttacatttcttctgcagacttcacaagatgaatctcagcccactagtgccgatgtgtttggtgaagcagcagttgcagttgcagctattctgtaaatgcctttgagtgaggagagcttttcctacatagcatattttgtcacatgaaagaacctcttaggaccaccatttgctgttctggtgacacattcctaattcgataaacaaggattgacaagagccattgcaacatgagattgaggaggtcatactactttctgacccatactgagtgccttccaaacagagagagagagagagagagagagagagagagagagagagagagagagatgcacatgcaggtatgcataggagcatgtgtgtggagatcagaggtggacatcaattatcttcctgaattgttcttcctctctgattttgaaccatggtctctcattgaacccacagttcactcctgggattgtttgtttgttttcctttgcttgtcagtttttaacgtgggtgccttgcatctgaattcggatcttcgtgcttgtgctttaagtatgtttccaatggaaccttctctcccactccaacatttttttctttgggaggtgaaaatggaaaatgaagtaaaaaaaaatacaggaagaatcatcctttccttccatctgtatacagagcagttgacatccccatgcagactctaaccagcctggggcaacacagagagagggaatcttagttttggaggcagaaagcagatatggcgtagtgtccggaatggactcaactcatcacataaacgtcagactgtcacctgttaggtgactcctccaagtgtatgtgcctcagtcatgtctcttttaaaaactgtaatgtctttctagcttacccaggtgagccatgacccctactttcacatacagtgttatataatctccctggaaacctgctgaggcagagattgcactcttcattttaaggaggagaaaatgaggctcagaaaattaagcatctattccaacatctgagttagtcaagaacacatggagctggtccccaggcagtctgattgtaaagaaggtatttttccaaccacaccaatctgctccaattaagacaaatgttaactgtgctctgatgagaaagtgccttgactctgtgtatctacttttaggggttatccttggataaacattccagggaagaaagtaccccaaaaagtctgccttgcccctaaattacctttgtgcccaaagggctgaagtttgtcttgaagtgtcttttgtctcaatgagtcttttgtggggtagggggtccctggctcttcctactgcaacaagaatcactgggaatccttaaggttgagtcttttgctccaaccaacaactatgcagagaatagagtgggaggaaatgtataacattatgctgagtttttcttcatgaacaatagattcgtctgagctgttttttccctatgaatatggatcggataagctgtgaagttgatttaatgaagtgattgccacttaaacatgaaggcctgagtctgatttttggcttatgtgaaatagatagatatggtggaatgcatctatacttcagtgctaggaggcagagaaaagtggatatctgaggttctttggcaggctagccaacccaccctagtccgtgagcctaaagtctactaatagaccctgctcaataaacaaggtagatggcacttaaagaaagacactaaaggttgatctctggcctccttatacatgcccatacacatctgcacacatccatgcccacttcaccaaccaccaacatatgcatgaatgcacatatacactcaatgtggattgactactgaaatgtcagaaaaagtgtggaacatttgaggcttgacttttgttttcttttgtagagaaatgtttaaaactatttctgtttcccagaagagaagaaggttcagtaggaagcatcaggttaaaatgaacacaagcttctactccccaaagcccccgtgaatggtccagataaatggtcagataaatggttgtatggaatccatgcaaaattatttagtcaaagaagacagtgaaagcctattatcctatagattctgtctctgttctgcccccttactttcttttatgtcccccatgtctttctctctctctcttcctcccttcttcctcttgccaatgcttcccctttctctccctccctctcttttccctgtcaatgaagttctgggtaagggaggactttggctcagccaacagttcctcttctgagcatcagtttcccttacatttgatgctttcccttacacttgagattaactgttcctgtcatcaggaatctaatgcgatctctacagacagaagtgacagagacgtgcacaataagctgtgtggcatcatgtggatgcacatagttaatgatatagggtttgggacattccagagcaccctgtaaagttcctaatgcgagccatttgtaacttcctgagacctgatttaatccacatgctgaaaataacatgtgtgcctcaagctagcaagaaagccttgccaaccatccaaagcatttttgcctctacctatcttttttttcagctgaaactcacgtgaagtctcaaaccatcatttcttctttcctatgtgaccctgcaaagaaggcatctaatttacaaatgacttaagtttggagatttttaaagctcttaaaggtatccgtgagcctaaatgcttcaatagtattttatggaatgttctagaggctccccctccatttgtagagcagtgtatttatccctggccatcttgttacaggtatcttgtcaagatgttctatgaggtattttaaggccatgcagatgtgtggtgatatgtcacgagattgctttgggttgcaatcagttttcaccatggcatgtattaactatttttggatgaattacttgggttcaaatctatctctgccactgatgaagcccagacagccacttcagtatctccgtgtctcatttttctcattctcgctgcctttggatcaagttgctctcagaatgcaacctttaagtaaatcagaaaaggctttctcttttgtccagctccctcatttctatctgttggattgactcaggtcaggttttcatttttgaattgtccttgcttcttatttatttgggctattgactgctggccagatatctggttattaagtcatttttctcacttcgtgcagcaccttttcctttgtttgatggtttcccttgctaaatggatactttttactttaaaaataattccacttacttattcttgcttttgttaccagggatttggtgttttatttaaaaccaacaaagtgctgaactctacctcgaagaggtgtctccctatcttttcttctaggagttcctgctagaggtcccatatccaagtctttaaacagctccaggtccatttttgtatgaagtatagggaaatggtccaatttcattcttcgacgacatttgggattcagttttcatcacgtgttttttgaagagactgtcttgttcccatgaggtgttcttggtgccttgtttatagattagtcaatcatgaatgggtagattttctgattgagctattggtattcaaccttagttgcacaatgcagtcacctcaaggatttgtaagaaatcttgagatgccccggctgcatcccaggacaagttagtcagtcatcagaagtgctatgcatcctacaatgaccccaacgcacagccagattgagaggcattagttcattcccttcccttcccttcccttcccttcccttcccttcccttcccttcccttcccttcccttcccttcccttcccttccctccccttcccacggtcactgttttcaaccctcctatcagaattgatgagccatggacgcttcctctcatagatctggcagccttgtgagtatgatggctgggaagtttggatggcatgtaacagaactcattaaaatgcaggtataatgagatctaaactttgatacacaaacttttgcatggttcccggtccaccctacacatcctgatcaaagagagcaaaagaaagcaaccaggggaattgccacttgggagacccacacagatgggcacgagcagttccttgcatacctgatgggcataggaatgggaagaattctaaaaattagtcagagtgcatgactgaaagcaagcaagaagggtaaatgatgagagcttcatggctgaggtctcacacttaaacctactttttaaataggtctctgggtggttctaaattcatggtgactttctttttattgtgattatgggagggctattctacactgcggaaggaagacattactatcaccagagtgtttctcatctatttatttgcatttaggatattgaggaattaaagggggaaaacaactctttgcaaggagcattaattatatgccatgcaaggaagcaattgtgtctatgttatgaaatattaaatcaaaatgcctcccattctcacatgtcccagagataaatacggcagtattttgaggcccctctcggagctgttttgcctgcaaatttattgttttgtctctattttcagaaagccctgttttctgtgaagtatagcactctaggtagtttttaaggcacaaactcctctagagtcgtacactggtaacaactcttatgtagatggtacacaagggatggggttgatcgtctcctttaagatgacaaatgggcagagggggttattgtctttgattgcaagccttacatcatctgtatgtaggaataagagggccatactttatctttagccattttataaatatttaagtctttatagttgccgaaagatattaaagcatattttacagtagtcggagtataaatattatatatagcacaagataccaaagtcgtttaatgaattcataattttcagttcacatttattggaatgtgttttatgttccaaaaaaaaaatcccatttaaaaaataaaatctcattctgctccctgacaacacacccagcattggccagcatttagggtggggcatcagccacaccatgcggaggtttccccttaggaagccagaaggcaggaaggcaggcccaaggaaatatttcctcaatcactaagcttaaaaaatattcatccaatattctttgagcaaacacctttggcttatatagcatctcagcaagcaaaaggaggaaaaatactttttaaaagaaagtattctgatgtagtccaggctgactttatcttgaacctcctgcctccactacctaagcactgagagttacagcatggactactatagttggctgaaagagaaaacgtttccataaacattctctggttttgatggattcctttggaagacctgaggagggaagagtgaagatgaagtctgaattatctatcctccccttccccaactctctttgtaaaccagaaggagagggcttcagggcacagtggtgactcagagtctagttttggacaatggcttcccaatgcattctgaataatcctctgtaatttagagagttcctggtgggttgtgtttcctttggtttgggggtttctgtttgtttgtgagttgtttgtcttctacccttttccttcgtgcaagggagtggcatacagtgtatgactacatctcttttcaattttccagcgaaatataaagacttttcctctttaatattttacaaagtttctccagctcccagcgggagtccatgctgggtaatgtttgctaattaccaacaacaaaactagacatacaaggctggtaaattacctgaccctttccattttaatgagacaacaaggatttcaccaagtgatgttgtttcgctggttaatggtgtcagcaatgttgtaattgtgggttgagacacattagctgaacagccacatgtagaaagggttttctctcaacaagccctttggagactaacgccatattatcattaagcctttgtcgtttgcatgctgctaatcacttactttattatccctcgtatccattgtctttctttaattgctctttaaattaaaattaaaaatagtttgaaagccctcaatggctagaatagcatcttgattatgaagataacttcaggaacttcaggggctggtgatgtataaccaggattaggagagtcctacagcctgcgtgctgccgtgcttgaaggcctcaggggcctgattgtggcagtttctctttctttagcctgtactgtttgtttaataaatggttatttatggcccttttggccattagagaaacttctaaaaagaagtacactcttttcataagtctgggcattgagcaaagggacaaaactgaatgggaaagaaaaggctgggcaggagagtttgagaaagcatcctaggagacccagttcccattctagtttagtctgtggacacatacttttgtcatttggggtcctgaaagggacttacacctcagagatgagaaggcctttggggtcattcccatagatgaaggcaccaaggccattacaattgtcacaactctaacctcatggcagcaaatgaagatgctttgttagtggaatgaattcaggactccttgagggagaggggaccatgcctgagggctacttctaagagataatatggttctgtgcctaggcctgtaatttgctagctgcttggttgacatggtacaatgtatgtcccttggatgtatgtgtcagcatgtttgttgatagactcctaaatactactttaaaacaaacaaacaaacaaacaaaccaactccagtgagatatcattgctgactattgagcgaccaaagcaagacttaaaaacttcccagtgttatgtctaacgtggcactcacactcgggagatttggagtattgcttttgcctctttttaaagatggggaaatcaagaataatctatgtgttgaatgcccatatgggctctttcagagttagaggttgaccttggactaaaatccatgcctttggttttctctgacagatcaatagccaattgttgatgaataataagtagttaagaataataagcagttaaaagaggcttgagaaatagcttgctcaataaagtactttcatgcaagcagaaggacctgagttcaatcccaagacccatgtaaggaagccagccatggcagttagtgtttgtaatgctcgaaatgcagaattagaaagagtgggtctctggggcttgctgcttggccagcctagcttacttaattagtgaattctaggtcagtgagagaccgtgcatcaaataaaacaaggtagatggcatctggaagaaagatacttggaacttatctgtagcctacatatatccatgcatgcttgcacatgtgcatgcacacacacacacacacacacacacacacacacacacacacacacacacaaagttagtatttagaagtacttgctatagtattgaaagttggcttatgggaccggagagatggctcagaggttaagagcactgactgctctttcagaggtcctggagttcaattcccagcaaccacatggtggctcacaaccatctgtaatgggatctagtgtactcatatatacataaaataaataattaaaaaataacccataccattaatatattatgatatatattaatatatcaccatatatatatgtatatataaaatatgtcaccaacccatttacagtcttcatagcatgttactatttcatttatagatgatgaaattgagacacaaaaattaaattgccctggaccccaaaactagaaactgaaagagacaaagctgaataatcagtctgtcctagctcatttctgactgtaggttgtagtcaaagaatctttagtgctcacaccttatgcgcatgggcaacgtcctggaatggactctcaggattaaactagcactattcatatcctcttgtgataattactatgtgcatgcaggcacacccttgttctttctagatccaaagtgttaactatacatttatccttcaataaaaccatatataccgaaggtctttcatcccttaaaagaaaaagaaaattaaatgctttcatttaaaggattgttaaaggcttggcaccttagtatctttcttggcctacacaccctttctctagggcagtagttctcaatcttcctaatgctatgaccctttaatatagttcctcctattctggtgaccaccccccccccaaccatataattatcatgttgctgtttcataactgtaattttgctactcttatgagctctaatgtaaatatctgacctgcaggatgaccttaggtgacacctgtgaaagggtcattcgaccctcaaagcaggtctcaacccaccggacccatcagggacacctggaagagggttgtcagtgataggattctgtttttctaagttgtgtggccaatccttctgtcacctggtaaactagtcctttacagctacttaactgtctttgaatttaagatacagttggttgtttgagttgccttgtgcagttttgcttggctattggttcatgctaaacaaaacaactgtggcccatttggcattaggtagttttaaatgcaaaaggacatttgaactgcaagacaaatgctgggaaacaaagccttcagccctgagaacgcaaggggactgtttataatgaaaaggtggttgcatttctagtcaatctatcactttaatgagctctttgtagttctttgattaatgttcacaaaacagggagaaaaaaattgatgtaatggaaacaaaatgctatataatcttggcagcaggcaggggcggatttctatgtgttttattagcacccacgtcacatcaccctcttgcaaatgtatatgtctgcatgttccctgacatagcaaccctccagtttactggaaatgcaatctgtcatgaaagatgagaccttatgttggtagccagacatcctttgtcccattatagtggcagtaggaggaagagctacccagagcaggaatggagaatcgctaataatggtgaaaagttgggtttggtctctgccatattgaaatgaggtgtctactaggtagatgacaatcaagaggagccagggcaagatgtttaaccttgtacaagcattagcatgtagcaagtactatataatagcaatccatgtactttaaataagtccaggaaagggcatgatagaattcagaagacagctatgtgaagcaactcagtgtgtgggcagaacacctctaaggctccccagaggaaaaggctgaaaagctgattggaaatggaagggaggagacaacaagtttgaagtgggtgggagtaggaccaagaatcaggacaggccacttatccctgggaaatagccttggcttgcccttactgcagtagtgtacatgaaatatggaggcttttcatggacttcttaaccaccaaagagcatcccatgtcagacctctgctctgacagtggctcctataaaatagtggggggttgaacagcagcggcctgggaacctggaacctggaacctcctcggctctcgtttcactccaagcctcctgactcttggagctgtggtctggccagtttcttctggaaacttcagcctctcagaatgaacttgtgaatcccacagagcaacagttgccacgtcagcaaagctccactcagcccagaaagactacacgcacgcaaggctttaagactgccaccttctttccaactttggttaatttataattttaaaattgtctctaattacctgaatgaaatgtgctccctttaaaacatccaagagctcatataagtaaaatttgggaagacatggtgagcttacacattttctatgcatatttgtatgtgtgagtttatacgtttgtgtgcgtgcatgtacacctatgtgtgcatacatatagaagccacagagcaacttctagctgcctcaggcactgtccattgttatttatttattcatttatttatttatttatttatttatttatttatagacagagtctcttgctggcctggactctccaagaaggcttagctaagcccccggagatctgcccatccccagcactgattttataaatgtgtgtcatcctgcccaagtgttttgcacaagttctggggattcgaatcagctcctcttgttcccaagtcaagcatctgcctgactgtgccatggccctagccaaggatcctaacttcactgctcaaacatacaaaataggacatattgttgtctccatagataaaaatacttcttaactttcaaaaatagatcatacattattttttaatgccctcatttttccatagcatatctattgggtgaatccttaacacaattgatttgctaaagcatgacatgcatgctgcttcctgtttagtgttattcatggattgcagaaaaaaaaaccatgataccatgtaattaatagaagggattaatatgtaattaatatgttgctgtacacatattttttttttcaaaacaaagtagtttggaataaagagcaggtaaaatgttaagtcccctgattcatactgtgttgtaaagtttcaaaacaaatgagaaggaaggaaaaaaatgttcaatagataaacagtaggcaatcatatggcgccatgctctaataataaaatcacctgactgggtagatattaggcttttccccaaatctgtggttttagttgcatttgaatagtgtcttaattcatcctacttccctccctctcccccactttcttcccttttgccccctttccttcctccctttcttccttcctccctttcttccttcctccctttcttccttcctccctttctttcttccttccttccttccttccttccttccttccttccttccttccttccttcctttcttccttctatgaccttttctaaagcaagtattagcacatacattctttaacaagaaagacttctaaggggtgactcttgacagtacatttgttttccatgtatgagatttccctgactgctgaatgaatctcacaaggaatatcaagccaacagatttagacaaggctcacttgattggttggtttcattgcctgtgctttgaatcaggtcccagatgcaaagcagaaaaagataaggcactttatgcagcaggtggcatcggctccccaacgtgccaacgaaatacagtctctatgaacatcacaccacaaaataatatcagtgtgacttacagcaaagaattaggacaggggtactaactcatgtcatgtcactggtcactcataagcatatggaaaactgattgaagaagaactcacatgctttgctagaacaatctataacatgagctagaaagatgactcggttgggagtgttttctcttcttccagaggacctgagtctgtccctagctcacaagtgcctctaattccagctctaggagatctgatatcctctttggcttctgcaggcacctgtatacagatggctcacatagatacacatacacataattaataatacacttttaaaaaagaataatcagtgacatataaaccactccgtgggtatttcccccagtaattgcactcattggggcctttgggtataatagaaatctaactgaaaatgctaaagtagtcacatgtcagagcttggcttaattttttattttttcaccacctgattaattttccttgtctcattcaccccagggtagactactgaatgctagtgaatattgtaaccccagtttatagtcccctggctgtgtattgtgtgtgtgtgtgtgtgtgtgtgtgtgtgtgtgtgtgtgtggtcatagagatggttttgtgagacctaagtcatcacattacccagcaatgactctccaccagtcattctatgctagagatacaagatttcttgggattctctagtcaaccccttcagatgcagaaaatgagactcagagcagagacagtactgggttcaagattacaaatccagcgactgctgggcgtggtagcgcacgcctttaatcccagcactcgggaggcagaggcaggtggatttctgagttcgaggccagcctggtctacaaagttagttccaggacagcaggacagccaggactctacagagaaaccctgtctctaaacacctaaaacaaacaaacaaacaaaaacaaacaaacaaaaaacaaatccagcgactggccaacctacgaggcagtgggtacctgttgccatctgctctcttcagctcctttctcatatgaggatccctctatatagaagttgttcatggtgtggagatatcaaggtgggcaaatttgtcttccccctgaatagtgtaaaaacaggaatgagtcagatctctgagtttataagaccaacaagagggtcccttgggactctgatctcatcatcaaaggtctgaactcttcagcttaaggtcattctaccttccctacaaacctctggtagaagatggtaaaggtactgaaggcaggcctggggtgctggctccatgggtaagttgtttgccatgtaaacatgagggttagagttcagattcccagcttgcacatagtaagtggcccacctgtaatcacagtgcttagggcaagggaggcaatcatccaggcaaactggctagctaaagtagtcacattatcagaatcagtttgctccagattcattgagagaccttgccttcatcagttcatcaagagcaactgaggaaggcacctagcatcaacctctgactgccacactcagggacacacacaaaggaatatgcatctccccatacatgaataacacacaggcacacaatacatatacgtacatgcatacaggcacattcacacacacatacacatgtgcatatacacatggataattatgtattatgtgtatgcctacaaataataaagtggtcagttggagtcccctttgggcgatgtcagaagaacttgttaccccagtaaatgatctctttttaacttttttaaattgcataaatcctgacactagattccaacattagaatccagagtccaacctgtagaacgtgtattagtctatttcaaggttaatgcaaggttctctttgacaggatttttctggtagctttcgcccacaatctctttcccaaaccaaccctataggcatgggttatttctgcccatccaagttagaaagcattcatgcctctccaacacggagttttctttacttgggctgctgataaatttgttggcgtacacactgtagaaatgactgctgtggctattactgtagttgctcaggggagctattcagatgcctcatttattggagcttaatagattaaaagtctaaattgagtctcatgatataagcctaatcaagttctaatctgcataattttcccataagcagcaatgggaaatttggataattgatgtttcagcagccgccaatcatgtgttaaatagcactgttgcatttacttatcaaaatatttttattgatccttacttcgtctgacatttggtttggggattttttttttttccttgctggcattaacaggaaatctaattcatctcctagatgatgtaacatgagatgtttctcttgatttttaacatgtctttatagatcatttttaacggtgatctttccttttacaacttcatattgaatacctgtctcagcaaacctcgatgactgggcctaatttatttccctagtttaacgcagcatatggatttctaaccatcatttatatgcacacaataaaagataatttggctccccctttgagccaattcctttatgttaaatccatgggggtgtgggaagcactcaccttcacttctccatctattctaggggaggtgattgataagaatctccatccccctctctccctgggaaggcttggggatttaactagggaagatttagaaagtactttgtgtttcccccatggaaaagtactgtaataaagtatttattatatacactgagctgtgcaggcagctctaccaaagcaggttaagtctgactgcaatggctcccagtcattgtatgctattgtttaaaagtgaaaacaattaaaaaaaaaagttagcctgacttgtctctgaaaattgccttccaggggttgggagaggggactgggatggagggagagtgagggtgatgtcttcacacagctagggcatggagcacacggttggattagttgttaatgcttggactcttaagtccaactatctggctgtggcccccagatctgtccctttttactggggaaactccagcagcttctccatgtgtctcaggaccattttctctttctaaaagtgatagtgtttactggtctctcaactcctacacctgtgatgaggactaaatgatgtggccatgaaagtgcctttggcatagtctggtgcacagagagaagaaagagttggcttagaggagccagccctgggaactcagtgtggttctgatctgagatctgcttagcaacatgggatgcccttgaccacactgcctaccctctctacaggccatggttaggctcaagcttcctcttcgataaaaccgtgtttgtttagggaggtcttgagacctaggttatgagaacataatttctccttcccctgcagtgtgatcttggtctctttccattaatcccattaccctaatctgtttggctttatagtatccttccatttgctttgagccctgtaagtgtatgacatggagccttcaccccctttcagcacattcagcctgcattgccccacagagctcttttctagtcttctagtttggccgtatcataggtagctggtcacttagatgcagcagaaaccaacatgtttgtatacaacaggaatcagaaacttttctctctttttgtattcttatacccagtcccttctgtacttctttttttttaactcaagggaaactttataagttttagagattataatttaattataacagttctcccttgcctttccaccctccaagccttcccatgtatacacatgtcctccacttgccttcaaattcatggcctttcaaaaaattagtgttttgtatgcatgtgtgtgtgtgtgtatacatatgtatgtatacatatatatgtacatatatatacacatatgcatacattcctaaatatagcctgttcaattggcataatgctacctgaatgtatatttgtagggctgaccattggtactggaaaacacttggtgtgcttttctctggggagagctacttctcatgttcccagctttcttagttgcccatagtctttccataggaatgaggcctcatgggcttgtccgtacatgctttgcttgtcccttgctgccatccctgttcagttcacatgtgggcagacatattggtgagatttcatgggtgtaacttctgacattaccaggagacacaatcacagcaaactccctgatcctctggcttttacaggatttccacccttctctccataatgttccctgagctttagatgagggaggaaacacttttttaatcagtgaaaacattgtcagtgttactttttcctgtcttttctcctagctcttagcaggaatcctccaagtacatgtgtcaaattcctttgttccaagccaccctcactaaagtataatgctctggacttctcattagctgatgcttccccttcctctcttgtccctggatgaggcctcacttgtccagcctatgagataaccaacatccagagaagaaggtcagctgcagcggctgacccggctcagtttagtacagtagatgcaatagagatgatttcactggaacaaagatgccataaagaaacacagaatgatgataacagtttcaggagttccaagaagcaaatgacttccagctatttaaggggaccagaaatcagatctagagaagagaaggttctagtaagggcctacacttgctaatttgaattaagaacctttcctgtgtgaatgctggtcaccagtttcctataatcctgaagaaaaccccagccttcctagtgtccaaattccttcctgagaagcttctagctgtatattattattattattattattattattattattattattaatcatcaccatcattgtcatcatcatcattactattgcagaaatgatctatttataaccaaaacatctgctgtgattcttggcttcttattaattttctgacttttttttgtgaaaattctttttttagaaaatctagcaaaaaaaaaaaaaccaacaaaatctatcatttctttatccagcataaagggtcttgatgggtgctggacctctctaccagtatttgttgagtacctcatataatatagtctttggtagacagcatttctgagtgtatgcttcaccctagttatggcacatttcactttagccttatagattccctgtgtaaggatgcttctggtttttagatgaagaatcagagactttggagagaatactggttactctgtacaaggctaacacaagtcataatatataccatcctctctaagacttagggggcgttgtggaagaggggacagaaagaatgggagagcctgaaaataagaaaggctgtgaactaacatctttgcaaaacaaggccagtgcagtcccagattcacaacaggagcagatgcctgtgctaagtctatataagaatggaccaatcaatagtcaggcatggatggaggcggggcttgggtctctacctccctcttgatggaccaatcaacagtcaggcatggatggaggaagggctggggctctacctcaatagtaaatgacttctggttgatccaatgagaagaggaagcatagccttagtcatgtaacccctgataacccaactaagctccaatggacagtcttcatccaagagtcatgcaggtgaccctgattaaactaaattggtcagaaaataaaattgaaagtcatgaatcctaggatgggatgaaaaagcatcagagggagataagaaatggtactggggaaagtaatgaaatttgcatgcatggaatgatatagccagatgacaaaataactaagcaaaaatttttttttaacatttaacagactctggagaaagaaaataacagaatttggacctgtaacttccagtttcaagtctattttcttagctagtcacatttgtttgtttgtttgtttgtttatacaagtcaagcctgttttacataagctgaaagttcaactaagcagggaattccctggcctaatatacttcctactgcccatgaaatgtgattgtccagcccgagataatgccagtaaaggtggtggttgcttgatgctaagtgaatagcagaaatgataccagtcacagctgccactgggattcaggacaggggacttccctggaaggagaggaggtagtctgggaaaaggatttctaactccatggagaacaatgttaacatattaaagcaaaaacttaggcaagtcacaaatttaagatagagccttttctaagtaaggtttcttcctctagatctctaacactgacaatcttagtacttttggcaaaataaagggctgtctcccatgttggaacatttcctagtttttctggtctggctgaagttgcctggtgtatgttccacatgtccaggcttgcatgtccagaacaccagtgttgttctatgtaaagatgtgaagggatcctgaggataaaagggtggaggctggaacactgtgaagatctgcttcttggtcaaccatgacctgatgataacatccaaaggtatcctcctgtctcattccttcaggtgcaatacaccaggatttctcttctcttcaagtttatttaggggagctgcattagcctggcacttcagaccatagttttctatattagggcccctaaggaggaaaaaaccaatgctaatcaagtctcattgctggtaatacaactatatgagacaaagggaacaaatccatactttcaaaattttgtcctacctctttaaagtgtgaagacagaaaaggagcaaaataggaggacgtgtggtctgcctggagctctcttgttaacattactatcctgttcttgggctcccatgtgaaggagagagagagacctttagtggaagagtgtctgtctccccatcacaccttgtaaattgcagacgctgatggaaccagccttggtgactatagaggaaatggagtgtgtaagtcaagtgtaagaggcctaggagacaagtaccccatttctaaatgaacgtttcacgcaaagaaactgagtctttccacagctgaaaaaatggaatctttaaataagataaaataaaaggatgcttttggcttgttgcaggctccgaaacaaaatacagctttcctaatactgtatgacccgtatctctgcctgctttatgggcgctactctttgaggtgcacacccatattttctcaagtcagcatttgatgatggctgtcaaaatacaggccatgtattatgcatatagcattaccgatgtaaggtgtttacttgtcaagttgaagaaattcaaaaaatgtcacatccacggaatctgcacagctgtcacttgcaatttttcatgcttttgaatgcaacttctgatgaaaacagtttatttcttccccttcactgttcaaagggaaggaaacagctagcatttaaaatgtgtgctcctggttatgcggttggctgaaaaacagacagattccgtagtttaggaagaagaatgaacactaactcactgaacgtgagttggtctgtatgaggagaaataatagtacaaaaataaaaattaagtgcactcagggactggaaactaagtagtatttttgttctttttaaagtttagcactcagtagaacatttatataaaggagaacaggaaataaggagccctgtacatgtctctggcactttgtgcttatgaaccttccaagggacatggaattcctgagcgctagacatccccaaatgaatggcagcatcagcccagcccttgtctcattaccaaccggtgactgtctgcaaaatgtggtcctttgatcaatttgcaacttcgatttggaaatgaagccaagtctccttgtaccttgaaatctctcatccgttggtaagcccatacagagatgagaaactgaggagtcagggatggtgttgcgcacctctgatcccagtacacagtaggcagaagtaggtggatctttgtgaattcaaggtgagtctggcagatataatgggttccagactacccgcggccccatcttatctcttcaaaaatgtgttttaattaaaaagatgaaaaccagaaaacaatccaaagtgaacaacagcacaaggctgacagctgcagttgctgtgtgcttccaatggaaagtgattttctaaccaatgcaggcatgatacagagaatgttgctgtctttgtctgcatccttaacagagcacacagtgggttgggctggaggaagtctcacctttactagacctggcatcccaaatcttaaatctttttttttccataaatctcatgatttctcagtagtgctgggttagttacctcaggaactcaaggatagttctagtacttagttcagacagtatcagcacattacttttgttacttcaacctcgtgcaaagattgatgtccggggtgtaggatctgcaagccaatgaaacagtgtcctgggggaatcaaaagagttgaatttctatgcatttcttttttaaaccaaagaacaattgctgaaagcctctgggctgaacttcctcactaagcagaaggacatgcaatcagccagcttaagagaacaggcagaatgggttgagataggctgcagtaacaatcaacaaaacatttctgagatttaaaacagcccctcattctctttcacttagaatgatttatgggtcagggcagctgtctggactccatctccatagtgacccatgtctccatattaggtgtggtttgggaagagaaggacaagaccaagtcatataccagacatgatgtgtgcttctttgctcgctttccattagcaagagcattttgtatgtcatatagtcattcctacgtaaggacaactaggcacaggagaggggaaactgtaagcagaataaaccttgacatggtctggacttttaggaaggtgtcagagtaagaactgcttcaagtgactcttctgtaatgtctaaacaaacaacaaaaaacttgctgactttatcccgtgttacttggtgacttgtcaataatgtgtacattgcgttttgagggttttgtatgtatactatactttttatcaatgccagtttttctactcctctgaatttctccccactaggattcacacctcctggaatggacagatcatcacccgacaacagcccagtgcacgggatgttacgccagccgtccatcacaactggggtcaacattcccatcatcacggaactcggtagggggtcactgtagctcactgcgtgggcgttctgtctttcagaccatgaagaaagtaaggagtttgtccagttctttagctttttaggcattgtaggtttctgtgggacttaggggggaatagtgaaggtgaggtttgagtagtgatatggcaggttatttgaaggaaaaaaaaactgttctatctttctcaaaagacaaatagacagttttcttcctgctggttcctgttttcaaaggagcatgagaatggctttgaaatcggggcatccatttgggaaggggaaagagaagaggcgtgaattcctcttcaggtggcttcttcttgaaggcccctcttctgagtgttctgtttcaaaggctcccacagttgcaagcctgctcagaacctcaggtctaagcccttcccacctgaaaatggatcccctttgaggatggggtaacatgtctgtctgctctgctatgtggcaaccccaccttgaccctgtcctagttgagattctcaccaaaggtcatttttagccaatgaccaaaatatgaatggggaggggatttgtggggtttgaatgctgtaatctgtagccaatagaatccaacttctgacatgcccatgccattctctggtagcctctgtgaagtttaaaaaaaaaacaagaaacaaaaaaatactgaatggctcttcccttgagacaatacagactctctattgtccgggtggcttagcttgagaatgctgcctctgtttttccctcactcttttcttcttttctgtactttcctccactccctttccctggacccttaaatgctgtatccaattagctaagccgggcaagttgcctttggtatcagtcaatcaggaaaaaaacagtgggacgcacattctaatgataacggagttgggtaagaagtgcttgtcttctttgacatcagtattttcttttgttctgatcttggtgtttccgactctcattggctccccccacctaccccctccatttcgctggctgtaacagcaaggctaccccatggcactgctttgaatgtgttttatttgtggctctggttggaatcgactgtattgttctggcctctcttaatgattttttcccccacacagcatcagtaaacctttgatcacacccacctgacctggcagtagccgccaaagcatctctgctctaattcattttccgtggcccaagcctttctctctccctttcttttaaatcccacgcgtgcccactctcccctgcctcctcctggcattcctcttccaacttgctgtcagtttgactgacatgtcttcacagctctcagaggaagtcaaaggagaaatataaaaattttaagataagaaatcctagacagtgccttccctccagctgtttatttttctttattctgactttatttgccttttttccccctactaggccctctctcagaagttctgcctctgaagccataaaaagcagccagttcccaggggatcttttcttactcaagccagatttcaagaagggtgcagaacaggctggcagccctatactcttacccccaccctgctggcccaaagccctccctgggaggttcacagtggatttatctcaaagataaaggcccctggtcatggctgcatttgtcagacccctccatggctccccatgccttggttaataacccacgaagggcacccatcagcagcaggtctcacaactggagattgctcttctaaatagacacagcaaagggcttcttggcagagacgcagcgggaggggagggaagcacctgccttcacaggactcacaaatgaaacgaacactccattttcttggccccccaatatatttcaaaataagagaggaggcttttaacacagaaatcttgctcgtgaggtgtctagaaaccaaggaataaattgtccaccatgcagccccgcgttgttgttagacagagctatttatctggacaaattcactcaggtcaaggagtatcacactgttttcaacaatacgataggtgtctttttcatgtttagcgttgttggctaaaagcctgggattctccatcgttcttcctagaaccacagggccataaacgaccaaggaagctcgtgtaccccagacgactgttttgaaaattcattgaacatctccaacacagatacccacagtagctttctaaagtacccatgccaagaatttctctttttatttagaatctgtgtgctagtagctgattagaatatcctgatttttgattagaggaaaaggaaaagcaaaaagcttgaggctccagatacaaggcagtaatttggttattgagtctcctaaccctctttcagaccagatttttttttcccctccaagctttagggtttgggccacttcttcctcctactctcagggctagcttctctaggaaccataccactctgctcatacctagcctcctcccacttcacccctgcagatattccccctttgtcatctaccctggcatgtgtgctctgttgtattgcctcagccatttgccccttaaaacacacagaggcaggcaggagagacgggcatggggtaaagtgctggctgtgcaccaggaggccctgggtgctggtcgcccacatccaagctgagcttgccaagggatgtcttgtcattctgaaagtccttatagacagacatggaaggatcccgaaggtttgctgcccaggtagtctagctgaataggtgaacccaaaagttaattgagagcccctccctcagaaaataatgttgaaagtgattaaggaagacaactcatgttaacctctactttccacatgcatacatacaagaacacatacatacatgagcacacacaaaaacacagaggcaaccaaggccaaacacattttaagactgtcctcatccatcccaatatttccatgataaaggctcctgacatttccatgagaagtaaaaaccaactttgtccgaagccatttaacgggctacttcccagctctatttgatcacctgcattgtggggcaatgcacattatgtaattgcttattgagaatggcgtacattatgacctatgtagtggctgttctgggaaatgggcccaggctgcatgtgctgttatctttctaagactggtgatcccagaacaataagcaagcttttcactgaaacgtgactcacaccatgacattttcttccaatcctacatccttagattgctcaacatccatagctgttccttctacttggggccacacaaaagtagcgctgtctcttacccatctcctcatacacaaggaagagatactgctccacttgaaatgattgtatagccaccatcagctgctgctgtcaacaacgaaagtaatatgccaatacatgtgctctttttttctgattcccagagcagaaatactgtgatcattacagcatgcttttggaatgtcagaagatacaactatagacttgggacttagtttagttgatatgaaatgcttgcctaacattaacaaagtcctgggttcaatccctagcactttataaattgcccacacagtaccatacccacaatccctacactgcagaggtgaaaggagaagcatcagaagttcaccctaatcttccactatataataagtttgaagcaaacctaggtgatatgagacactgtcaagaagaggggagagacagagagacagagagacagagacagagacagagacagagagagacagggaaacacagagagagagaggttttgaaaatgtttttaaaatatttattattcctattttatgtatatgagtgtttgcctgcatatatgtatgtgtcttgtgtgtatgcttggtgcctgcagaggacagatgtgtatgttgggctctttggaactacagttacaggtgagctactgtgcaggtgctaggaagcctacacaggttctttgcaagaacagcaagcgttcttaatcatggagccatctctccagtgcctggtttagaaaccttaatcttctttatttatagttctagagtatggcaggaacccataacaaaatggttccttatatttggcccactatgagagcagtggtgtgtgtgtgtgtgtgtgtgtgtgtatccatctccacagaaaaaggaagtgaaatatgagagaagaaaatgagacatggagagacagtctggctagaccaccagtggagcttgtcttgttctaatctagtttgaatacaaagccacttgtgattggctgatcccaagctacttattataagaatttgttatatcatttccacatgaggtgaggcacatgaagttcaggacttatacttttagttgaacatgaaataggtatggagacagcttagggcctatcataattcagtttaacagaactatttggagggcccataagtaaacctttagtgattctgagaggatcagagagaggctggatatttccataatgtcatggattgatagacaatcaagatgccagtctccatttatccagggcatggcatggatcacatatggtcttcctcgtaggctcagagctacttcttgagagactgcagaacttttcccgttttccagtgagagcaacttggctgcagggtcaggaaatgctttgtcaaaaactcagtgacaaaacaagactggagacttttgcccactctcctacaattcgattgctgctaatacaactgagacccaaatgtgatcaaatttggaaaaatcaccacaaagatttgcctccattagagtcattttctagggtggcaaaaaaagatagtgccatttaaaaataattccacgcctagcctttcatcctattatcatttattgtgactcatgcaataaacaaaagggtttttttgttattgttggtttaaggaaagttgtcaagaaagtcctttaaaaaaattaaaacaataactctagggaagagaattagctgcagatagattcagaaaaagacacagaaaggaaacctcatctgttctcttcctaaaactgccttaattattccagaaatcacaagtgtacctctctccaacaccccacacttccctctattacaattcaaaattgatcatttatgaagccaagataggaatagaagtgaatttatcatttaatttttttataagttaaagacatcttacttatcacccattttctaaattaaagcacaactcatcagtctgtgggtgtatgcaggaggagtccttgggggcctcctcagatgacaatgaagaaagacatcttgccctggccatgtcttcttctagaacacagagaagacagagctgtttagagggggaagcagagtgtggggagatttgcagaggaagtcagaaaacagcaggaggcatcccatgtgttgagtagaacccattgagcatgggcctgaattcagagaagaggcacaccgggtcctacacaggcccatgcttggggccacctctaggttctgcctgaggataaactgcttgccatttggccttgctgcatctctgatccattgcttttctttctgcataagttgctttcttttctctgtggctaaccttaccatcccagcatggctactcatggctatgtccctctctcagaggacttggctaccaaaaaatgcctgagggtgtttcttggtcatgattctaaaactgtaacaaaggactggtcaacttgccatccacttgccagtccttgacagttgccatagaacaaacctgcttgacctcattgctctccaggtcttaggaattaaagcaatcctgtaggagcaggccacttgatcccagtgcttgccaaccccgggatccatcaatagcttcctcatgctttttttcttttacagtaacttaagtgtctctaacccagtcacttaactatctctctggcttcactaactcttgtgtagtctccaaagctaattcttattttatgccttttctagtgaatgataccaatgttcagtttttggaccaagacgatgacgatgaccctgacacagagctgtacctcacacagccctttgcttgtgggacagcatttgccgtcagcgtcctggactcactcatgagcgcggtgagttgtctatcttctttctctccactcaagcggtggggtacacacccatggactgtcttcacagtaggagatactggcaggaacttgaactgtgcatggaaaagagcagaagttcatgaatgtgtctctttagaaaggacaccaatgtttatcaatcacacaagtaaatattataaattcctcaacttgcaaggaagacatggaaagatatggcctggtttggaggataagagaaacaccacttaaggaaataaatattttataccaagatgtgagactctctcaaggaagacaaaggaaactgaatcagaatgagtaaagaacagggaagacattgaaaaccatgttcatgagtctttggacttaatactgaagagtgatcaggttcatgtctgaagcgcttgccttatctatgaggtgtcttggtcaggcaagattgggtgtagtgtccatgtaagcatcttttctagctggacggagggaattctgatagtgatgcaagcaggtgggcaggtctgggcactcgtttgtacgacggggaacatttgggaatagcctgaatgtgaacagaaaacagaaaggacagggtgccaagggagacaccagcatccctgcctatcactaaaagactagaccttaaatgaggatcaggcacaaggctcttcccagctgaagagcaaagagataatgatggtaaagaggagttgttgactaagacatcaaaagcagttgtttttcccttagtaactttatgtgtatcaagtggtcaagccttttaccacccccctttgtgacccttcaaataagcaacaactaagaaagcacattcctgcatagtggcagtatcatccactgcagcagacaacagcaactgtttagaacaggccacagcaggtactgggagtacttcccaatagtatctttctttaccagatagacaatgctcttcattttgcagtagtcaaattcacagtttgtgaaaatgagggtgggcgatggataaaaactgacctttgctgaatccacggaacagggttttattgagcatgttaaactacaaatataactcggaggaggtttttccatacatattctcacattgctaagaaaggtcattctcttgattgtgttaagcaacttacattctaattatgcattattatactcattcattaaaaatgaatccccaaaggattactgtgtaaggaaaagaggaagacatgaggctttcagagatgtatttagtttattccttattactgaacatagtacaaatataaacatatcttagtgaaatattagagttatggttttaaaaataattatgacataagatcacctgggttaaggttgattggtggcttttgtagccagtaagaagaatcgctgggccctatagaggggtcctcctggtttcctgggatactgtgactgacgttggagctgctgctaatgttggcccagtttgtacaaactcttgagcaggttggaaagaacaataaacactgcttgattgggttcagtaaagcaccaaattctctgtaggaggccagatctcatctctttagaaatgtcactttaattttgatcctaatttcagtgattttagaactctgatcttactgacatacaagtaagctgtttatgagaatttttttttgttttgttttcagaagagaaaataccattaagagctttttaaaactcaaatttataacatttgtatttctaggcagtcaatgtgccccaggtcggatcagatacatcatttataaagggtgtgtttttataaattactgggaattctgaactagtgaagctgtacaacagagcaggccaaatacttgtgaagccggtgatgatctgaagctgatgggattgaagcttctgcacaaagggacacgtgattgacagcctggagttggggcatgtaacagtgtggaatcagggcatatccgcatatgagttataagactcaccattgaacagcatcactagggagtcagttctcagaaactaggatgagaagttgaaatgaactgattttgtttgttttttgttttttgttttttcaagacagggtttctctgtatagccctggctgtcctggaactcactctgtagaccagggtagcctcgaactcagaaatctgcctgcttctgcctcccaagtgctgggattaaaggcgtgcgccaccactcccagcttctaatcactgtttttaaaggtcatccatcctcaacctctctcgatatcaaaattgaagtgttgggacaaagtgacttgtgccacacagatgtcatagcctgtaagcagtatttttcctgcatcatagcctagagaaaaatcaatctaggaacttagtacttgtttttcatgtttcttattagctgcattggttattgagggcctagaactatgtaacacttcaataacacagtctgatcttttagaccacagtgtgggagaaacaggtttaggtattggagcaaggcatatcaacaggcccactgacagtgtcctttcctgtcatcaatcaaaatcctagccaaattattccagaccttgctctgttatctaggatgaaaaaactccagttgaggtctggctcaacacagacaattagatccagaccctttgacaaaaaatgctacctgtgatgtctttgtatttcacgccagccttcatttatgaaaaagaatgtagtttggtcaattaccaaagccctaactaggaagagctaaaatgaggttccaccaaagagcaggagcagaggtaagacaaccacagcctccatctgcaggcaccatcacaacgcctaccgactttaaagcacatggagtaactgggacagtgtggcacagggtcaaggcaacctgaagcgtctagatctgattcaccaccagcccttgtttatcttttccattgtctggaaatcagttgagaccaaatgctaattaagcgtgatgtgaacaactccttatgtctttgtagtacttggagaaggacaaaggaatatgaaggtctttcaacaagcaggcacatgtgacaacagagctgtagatgtgttatttacatgcctgtagatgcatatatatatgtatatatatatatatatacatatatatatatatatatacatacacatacacatatatatacatacacatatctatctatctatctatctatctatctatctatctatctttatctgattactcattctgtctcctgaacacatgcgtgtactcatgcttaagaacaaaagttttcaacctatgtgttgagattcctttgggagtcaaacagctctatcaaaggggttgccaaagaccattggaaaatctagatatttacattatgattcataaccgtaacacaattacagttaggaagtagtaataaaaatgattttatggttggagtcactaaaacatgaggaaatatagtgaagggttgcattattagacaggcctagaaccactgtttagagagataagacccgggagcttttagatagatgagtcagaagtctgtaggagagatatgtctgtgttttcatgtctcatatgaactggtctcttgatgtcagaaataacaagatttgtattactaagactggaaaacatgttcctctgaaccatgggtcctcctcccctgctttctacctgtactataacttcctggagtggggcaaaccctgggtgagccttatggtgaaggctgaactgtcagcccaggataagctgctgctcttctagagatgccagctatttactgctcatgatgcatctcttatactccatccaagagcccccgtttcttctgctcacaagcagacaggcagtccgcaggtgcagccagggcagatgggctagcagcagtgttatgtctgagcagcaaacagcaggatattgtgctggactcaagaacataccccttgctgctacaccaggcaaggcagatccaggagaaaataattgaaatagttctcattgctcgtgaaagaaaaatactaaaaataaaaaatccacactatgaaaaccagcaaatataaaaaatggcagatatgacatggaaaatgacaattttagtgcaattatagacgaaaggcagagtgccattaaagttaaggcaatgttattaaaaaatgtgttaattttcagttaaattttctataaaagaccaattagtttaaaaggcttgacagcattaactgtgaaacataagctccagtaattatacttaaaaaaaaaaaagtagagagaagatgctctagtgaggtggagctgcacaggcgggggccagcacacattaggctaggtggcactgcagattcagctcttccttctgcaattcctctgcccttgttccagcctttcacgattttgcagtgtgtccttacaagacccaagagtcactcattgctagaggtcaagggaacctcacacatgattgaaggcagccctcccttattagagatgagaacacaggagcagaaagtatgggcatattctaaattggctgcatcgggagttaactgttcttttttataaattataattcattgagtactggttgcatatgggaaattacacaaattgtcttgtttaacactagtctataaatttgtgtttttcttttttcttccctattatatggatgaggggtcaagaccatagaaaacttgggtaactttcccattatcatagctattgagtagccaagaaaggattaaagattatactgtagggcatggtgagatggtttagaggcaaatgcacttgctgctaaatataatgacctgagtttgatccctaggtctcacatgaaggagaaaataaactcccccaagttgttctctgtcctctaccagtaccccatagcacacacttacacacaaataaataacataaaaaatttaaaatctcataatcaggatgacagcttactctactacaaagaaagccttcccaagaaagtgtcttcttctcttcccaagaagcggcctctgaattctttagactgcacaggtgtcctggctgcaggtaacaaataagaatcaagttcatctcccatttgctccccagccaccaaagtgacacaggattgggcaggacatctgtgaataatcttttcagtctacaggtttcatgcagaagagtctcctaaggcattcatcacatctgtcatggacttggttcatggtggggcataggaaagtctggagagtgtaggagcacaagagacaaaggttcatgcatgcccttcacagtctacaaatcctctacaccagaatattcattaatctacaaaataattgtacattctggcttctttatcttctgcaaggatagtctttgatagtatttggagtcctagtgtgttttgcctcatgatactgaaacagacccttcctcttcacctagtcctgtatgaaaccttgtcacctactttcaagctgaaccactcatggaccattttgagacactgtctttgaattacatgtaaatgcaggcctggagactattgactactcaattagtgccagtgtctctgtataaatcatttaaatacatgctgaggtaaaatcccaacaattcaaccaaactacgtccttccatgtggaccttatctgtatattccaacaggtaactctaccatactcattgcttaaaataaacagattgcagtttccacatggagatagatagccacttttcttttggaaaatttaggaagcacaagaatatagaaaaatattcaagtggtttgtatttccaagactaaagaaaagtgtttactattttggtatgtgcaaatatatatatgcattttttatagatagataggatagacagatgggaatagatatagacagacagacagacagacagacagacagacagatagatagatagataaaaaataatagctaaaacttccagttttaaatattggttaattatttctttttaggtaatattttgttgagagaatttaacatgttatttttttttaaaaaagtcacaacttgcaaagctcccataggatttcgtgatactctcttttaaaatagaccacaatcttttactttattgaggggtagttttaagatattttgctacaataatagtcccttttattagctttcaattactataatagatatctgaaaaaatctacagcaaggttgatttcatggttttggaggtttcagcccatgactggttggcctggctgccttgggccttcattgggctttcactttggtatgtagcagaaagagattaaaatcccacagtgttttgaaggatgtgttctcaatgatgagacaacttccctccaggcctcacctgttaagggttctaccacctctcaatgcaccaagctggagaccatacatgggccttttgtacacattccatatggaacctttaacactcaagggttatgcgttttgtacatgagtcttggaatgaatagcagtgcatttgtttgaggcaaacctactgtatgtcgagcagatatgaacatttgtgaagctcatgatagcctttcctaattatctccccagaataagtgtgcccacacgctcctatcatgggtatgcaaatgccatctcatgtctgtggtattctgtgctgccatttgccattttccctaggaggacctttaactgtgtttatgatagctttcaatatatacactttcatttttagttagtcctgtaaattttatatatatatacatatatacatatatatatatatatatatatatatatatatatatataaaattttcttttgataatttcagtttttatccctaaagacttcttgctgtataaaaaactatcaaaagagatgaataatttagttgtatttttaatgtttttgatacttcctttcctttttgagaatttaaaatgaacattttcacagtagaaaaacctatgaaataaataaaatggaaatttttttagatcaagaatttgtttttacaaaatacagatgtatctgtcagttcagatctatgtttttaacataatttttaatcgtaatgcatatgagattctactttaaaaacttttaccaaaatgtatttttgccatactataattttctcaaaacatgttaacatatgcacaatatacctcatataactgttttgttattaattcaatcattgttatagacagtttcccccaatccacgtgtggagaaatcacccttgtccagtgatgtgtgatggtttctggactggatcagccaaccttctctgtaaaagcctggatgaccagacttttcacttcttaagagctgtagtggcagccatggctacttcccttagctgttgttatcctgaagtaactgaaagtattacataaacaaatgagcatttctgagtcccaataaaagttaattaaaaaaaaaaacctgacagtggctataaccaaccctgcatcttaataattataaccactgaagtatgcattcttgttgatagaatttctaatcctagccatagtggccagaaaaagtttactgtaaaacttgagcggaaatataaagctctctccaaaagtcacttaatgtaattgtatccagttgtcttttgaagtccatgtgaaacctacagttaggtacagatcaaacttagctgactaggtgtaaaataacaagtagctctgtcccatgttataagaaacagaggtggtcttttttccctaacagtctttctttgcagatgactcttactgtggttcatgctttagagcaaaaacaattctttgtaaaatatttactcagttttaaaattatgagtgtgtacatgtcattgtgggtaggcatgtgcatgtgagtgaatttgcctgtagaggtgtgggtgatcagaatccaacataggttctgagtagtacatgtctttaacaattgaacaacacctctagtccccacacatgtaccattattcatgtccagagactggtaataaagagattgacattaattattttatatactttggatgatattctccttctaacttatgatcttattgttgttgggatattttttcaaagcattatttctaggctcatcaattcattaaatatcctcttgatagttcattgctttatggcctcatttttcatcatgctactcaccttaggaaagcataatttaaaacacacacacacaccaatttatagcatagatttattcattataatgcttttgtcttcgaactgcttttatattttcaggtttattcacgacatttttttttttgcgtgtcataatcaaatatcccttatatttaagtagtctctattctaagtttcacttggatcttcatctgctgctagacattcagcatatttagacccatagttcttaacctgtggatcaggacccctgcagaggttgaatatcagctatcctgcacattagatatttattttatggttcataacagtagcaaaattacagctttgaagtagcaacaaaaataatgatatgttttagactcaccacagcatgaggaactgtagtaaagggttggggctttaggaaggctgagaaaggctgatttagaggatcccctgagacattgtgtagttgctattgtttgttacattttatccataaatagttggagctcttttgtaaatgttagctattatcacaatatactgaactcagcatattttagaaattttcttataatatattttgttgttctgttcattttgtataaaaatactaatatggcattaattttgttttacaatagatctgaaaattctttgttattttatagattctttagctgattatgttgttatactgtatataactacatctgtactttattattaattattattattataccttttctttgattctatgattaccttttaccattcatcttttggtatataggttaatattaaatgcttaactgtttatgtctagtgatgcttaaatttgtaaatagttctgtgtttagctctagttagtgtttaatggtcccctctataaatacactcaaaactgatattttaagtattaatatctagaaaaccttggtatctcttgtttttctccttgtataaccagttttagtgtcattacttcctctccccacccttctatttcattttttgaattataacattcacattgtactaatagatgattttatgttgtcatttttcttttcagaattagttttgacatttgtactcagttgtatagtattttgtttgtttagtaaagttttattttctcaaatgtacatttgattgaccctgttcatgcatcttcagtagcagctggggcacctccaccctttgtgtttctggtgtgaatgacttgggctctgctttgaagccagcttgataagtccttcactaggcatctcctgaaggaagggctgccctgaccaaggagctgcgaatcttcagtctctcagacagcacagctggagaactaagcttgtagctgggtacttccttacagagttcatattatgcagatttgtcaaacaagatgagattgctcagcttatccctagccttgcccttggaccacttcctttttgccttgcaccagttttatttactgggtttttgccttttttggctgactttctatcatctttcttcttgtcattcttgggcagcacggtgaagctcaaaggagtatgccaccactgcagcatcactaagatatggcgggaaaaagctgcactgttttttaagtgacaagtatgacagccttttgtgcatttacatttgcacatgtgtgtgccttcttgtgtgtgaaagaggctaacagtcaatatcatttgtcttctattacctttcacctcattttgtgagacagaatctccaactgacacaggatctcaaggattccaggaactgggagcatgggagctttggggtcatctggttttgtcttctcagtactaggattacgggcatgcaccaacacttgtctttttatgaggagtcaggaatctgaactcagatagatcctcatgcttgtatggtggatatcattgactgagctgtttctccagcctcatgacagcattgcacagtcacatgtcttgatatacctctccagtattttcaaaccttttaaggttaaaaaaaaagtcaaattgtatttaagaaagctagtttttgcttctgagtatcttttaaaaatcaaatgaatagaaatggcaggctggagagttggctcagcagctctgggcttcatactgctcttgcagatgaccaaagttcaattcctagcaccctagtgaggcagctccaaactgcctgtaactccagctcctggggtccagcaccctcttttggcctccacaggcacctgtactgtatgcacaacccctccccacaatagtctaaaatgaaatcatctttaaaaatgaactgaataaattcttcagttctccaagatccagaatcattccaattgttttcacaaattaggatgacagttttatagtctatagagtccttggaacaaatctgtcctttcaaacttagttggcatttcgttcacatttgttatgggagtcccatttacctaatgctgttccttctctttttttctaagaataggattgctagtcactttctttcttcatttaataatttaaatccagatattcactgggcacagggcttggcatgactcttgtttctttggtgaagccctgggtctgcttcttaggttcatgctccattttaggaggggtggtgcttgtgtgatgaagtgctttcttgccttagtttcttgaattatttacatgcttttaaaatatggcactactgtttagcatatccatcactgtcttcagaatttgtcagattctggttttttttctaggacaataaaacactccccattactctctctctctctctctctctctctctctctctctctctctctctctcacacacacacacacacaccctctctctctgtgtctacatatgtgcccatgtgcatgtatgcatgtgtgtgcttacatacttttcagttttacagcttattactccacagataagaatttagccattacaaacataattatcttttaatcatgtaattatcttttaaccagttcttttaagaagtgttttattagaatattaatagactataaaattcacccaagtaaacagttttatgttttttaagcatatataaacatccccaagaatcccttttagaacatactcataactttcgagagaaatctgtcctcgttttccttactactttagctacgcagccctgagcacccactgatatttatatccatctctctagaattgactcttttggatgtttcatataaataaaaacttactttgtttttatgattcatccatgttgtagcatgtatcagtgctctatttctatttatgcacagataattgattccatggttctaacagttggggatgcattcactagctgattgccattttatttgtttctagccctttgtgtcaatggcaaatgatgccattatgaatttctctgcttgggtctttgttctgatgtgtatttcatttcccttgggtatggttagggtttgtggatcctgtggtaactcgaagtttaccaactaaggaactcccagacaggtttccaatggttagactgcttattgtcctactggaagtttataagggcttctgcttctccacattcataccagttcctgctatctatctgtctcttgttttatcacagctatcccattgggtaaagacaatctctcactacgactttggcttgtgtcaccctgtggctactgatcctgggcctctttgggtcttttgatcacgtgtcaatcttgttttgaggcctcatcctttttctgtttttcaaatttattgctttttggtagttgtgttattgggggactttaaacacttgatactactcccttataaaatgcacttttctccaatatttttactaattttacagagagtttttactttctacatactcttcccccataagtttaaaatattacaagatacaaaaacattccaggaatgttctggaactgtatcatgtttatgggtttgctcttattctaattgtatcttccaatccatgaacatgggatatctttccacttatttggatttcattcatatcttttgtaattatatatagatttcagtacaccagcctgtgaactccttgaacaaacttcttctgaagcatcttccttcttaagttcttcttgtttattgaaagtttataggagaagggtttgtacatttgcttgttgatttttgtaccctgaaatcttcccgaactcctattacttatgatcatgttagtgcgttccttgggactttcaatacagtgccatgccacctgctaatgcacataatcttcattcttttccaatgtgaatgcctcttttatttctttcaaactggctagaacctccagtgcaatttaagattaaagtcatgaaagtagttccttttgatcctaattataaggggaaaacatctgccctatatgctccttagtatatttttgggtttttttttacccatatgtatgtatgcgtgtgtgtgtgtgtgtgtgtgtgtgtgtgtgtgtgtgtgtgtgtgtatttatatatatgcatataatgaattgtagtcagttctattcccctcttttcatttctctgtcccactgaaactccttgtctccatagttctcacttctacttttccatgttcattttgtctgtggcccactcagcttaattagggtttcttacccaagcttgagtcagaggatatttactagaacaaggacatttgcctgtggctacactactgaggaaaatgatagcctttcctctaacagtttttaactgccaatcattcctacaggaggggtggggtctctctggttcctccccctatccatgatgaaatattatttgactcaattttgtgtagttcttgtgcagatgactatagctgtcatcaataagtgcattgaccatgttacatctagaaagttttgtcctttctcgttccctgagcctcggaggagtgttatagttgtcccagtcagaccgcatcactctactgttgcttactttctggtgactacctactcaatcaaacagattcatctgcattttatcttgaaaactgtttccttctgaaagaaaaaaatgtccctcatttctttatatttgggtagacggtgtgtcagcaaacggggttatgaatgtttgccatctatgtacctatggttggatttatctcctggccagtggtctagaatggtgattggagcagagaggcacctgtaagttttgtgttcagctctcccttattcaccatggtagatgggactcgggaggatattcctctgcttctgagggcaggggatcagactatagggaaaactttgggaaatattaacatgccattggtaagtgtaatcaggctccagtatgtagtctacaggaccttccctgtgctcttccttagtctagagcagcagttcttagtctgtgcatcacaatctcttcagagtcataaggcatatcagatatctacattatgattcataacagtagcaaaataatagctatgatgttgcaacaaaaataattttatggtggggggggggttacaacaacatgagcaactgtattaaagagtcccagaaattagtatggctgagaaccactggtctagagagatcttgggcactgaggctgatagagataacaggtacaaggaagaaggacaataatggccctccagcttctaggacaaaaactgcaacaggaaagaactgtcaagggatatttggggatgagagtgactgtcttctgtcatcaacaacagtccctcccccagtgtctctgggatcaggtcagtcatatttaccagcacttcctggaccctgagtttctcagtccttcaggtgctaagaattgggaatcctatatatgctctgatattcaattttatgtgtgatgacactgagaccaaaaaggtccagaactctctaaggccacagcttctgagaaaagcattccactatgggatcccgatcaaaaacaaaaacaaaaacaaaaacaaaaacaaaaacaaaaactcagaggatttggtaagtatgcaaatactgccttgcctctgtgagcccaagcatcaaactctgactccaaggagacaataaaatgcagtggctgggctgctacccaaaggagggcagtccctgagactccaacccccttagccatcgcatatgcatctgctcccttgggtatcctaagctctgcttgttcacaccagggaacagttgaactatgagcatacattctcagctggatagcctgcgtgtaactttaccagcattctttgcagtcagaattctatgtgctcttcctttgagtgttttaataaggaacataaacttaatactaataaccatgctgattcaagtgactgtaaacactgacgctcaggacaggatgacacaaagctagtgacagagtgagaggagccctcatcccagtctgctttgttctcagtgacccactgtcagctaaactttccaaaaagttgcaagttgcagctaaggatgcacctgccttttctttctttctttctttctttctttctttctttctttctttctttctttctttctttcttccttccttccttccttccttccttccttcctttctttctttctttctattggttcaatttcttatttttttttaattaggtattttcttcatttacatttccaacactatcctaaaagtcctccgtgccctcccccctcttctcccccgccccctttcttggccctggcgttcccctgtacttaggcatataaagtttgcaagaccaatgggcctctctttccactgatggccgactaggccatcttctgctacatatgcagctagagacatgagctccagggggtactggttagtttatattgttgttccacctatagggttgcagatcctttagctccttgggtactttctctagctcctccattgggagccctgtgttcctaggcaaaatgatggacctggatggcatcatcctgagtgaggtaacccaatcacaaaagaactcacatgatatgtactcactgataagtggatattagcctagaaacttagaatacccaagatataagatacaatttgtaaaacacatgaaactcaaggagaacgaagaccaaagtgtggacactttgcctcttcttagaattgggaacaaaacacccatggaaggagttacagagacaatgtttggagttgagacgaaaggatggaccatctagagactgccatacccagggatccatcccataatcagcctccaaatgctgacaccattgcatacgccagcaagattttgctgaaaggaccctgatatagctctcttgtgaggctattcttgggcctagcaaacacagaagtggatgcttacagtcagctattggatggaacacggggcacctgccttttctaacaaactcacaaggcacatagaactccaaaagccatggccaggattgggtttgatttcattgagatactttgctttcttctcatggaggaaaatagaacatgccacctttacctggtgttttctcacattcggctgggcaacttgtgctgttttaaggttttttgttttttgtttgaccttaattaatatttttaaagcccccatggccttcttccggacaggaatgctactatattccaggtgggagagaaatgtacatgtaggggaaagttctttaatcacccatatttgcctcagatagctgaggctatttgcaaaaaatctaagacatgcacactaaactactcagctcataggtttatgcagctggttgattggcgaggccttctgggtccagccattatcaaagcctacgataagtcactgagtgtggggcatcctagattctctgggcatctcattccatagagaaggaagttgtgccatttgtgggtggcctcctaacatatgggtgacaggctctcagaggttgcccttctttggatagcagcccaggcatgctgcatttattttgtctccagcgtcaaagttgatgtttaggctgacagaagcaaggaagtatttgtatacctgacaatagtagggttttttgggggtgggggggtggggggcacctttcttttcaacttcctttcaagaaaaatcctctgaaaagaatttttaagtaaggtttccatagtagaagcagtgggagagaaaagaccgaaaggattggaggctgctgtcttttcccttcccacagacaagtattcaaaaagacaggccagaatctttcatgggagatactaagaaaagttgtaatttggacatcaattgtgattttcggtgttggcttaagaatgcttctcttctaccttctttctccagacatacttcaatgacaatatcctcaccctaatacggaccctggtgacaggaggagccacaccagagctcgaggctctaatagctgaggagaatgcacttcgaggaggctacagcactccgcagacattggccaacagggaccgttgccgagtggcccagttagccctgttagatggtccctttgcagacttaggggtgagtctacagctcaaataactcctgagtccaatgtctgtagcaagtatgatctgaatgacctatgttggatggtgacaagctaggcatctgtgtgtctctcttccactgtaatagactaaagagatggaatttatggagccttagttaccaggacccacactttatacagaggtcttcctgcaaattcacctaccagatctttgctctctggcaactgaggcgctagggcatttgcaccaaggcatcatggcttcgatgctgaaggcctttcctccactgctgccttccttgggtattttcttcacagagatggaaggggcaggtgctaacacaacacagccaaggttgttaagcattttagcagagtcttgatactcagctttgactctacctgagcatggggattcttggccccaaaccctggtaccatagttttgtatctgcatactgttgacacaaaaattatagcactcatcttaaagggaagtaagagatactttattctagagccatttgggaggttaatggctaaggaacacatctttacatactacaaattccttgttttcacatgaagacagtttcatgaagttgcatagtttcacagaaccaaggaagctagaaattgaggcaattttaaaattcatcagtagatacaccagaagcagatacagcaggctgagagatttcctataggccctggatgctgtctggtaacatttataacttttgggctggtggcacttagtggtctgctaattaataaattttgaaatgtttgtattagtcacaagatgttagttctgacagagagcacttctgacagggcaatcggcagctgttgtagagggctagaaccagcccaaaggcaatgagcttctgacgttgcaacgttctaatcttgccagtgtattgaagttctgatcagtcactggactctatagacacagcttcatttgaggatattttgttcatagtaccatccaggttctggtgggatttgaagcatcaagaccatcatgtgtatccagcaccattagccaaagtggcagggtctcaaccagcacggtagatgtcttgatgtctctaattggtcttagggtttctgagtctggacccagccactctttcccaggcttcctttagtggaggagaggagagcctctgtttggattctgtgtactcccttgggtcaggcactttgggaaaagtcccaccttgacttttattccaaattcacctaaagaaggagttttaggagtggaaccgtgagtcttcgggatatttatacttattgcacaaaaaatagtgttccccagaatgtcccattgtggagaatgtcttgttttgtaacacaccaatgtctccttgtgggctaggacctacattaatctggggccattttaaaaggaattccataatcagtggctcttttttattacttgcttacttatacacttgaatcagacttgtgttttcaacaattgtaagatgttagaaccttttcagtctaatatgatgcccatcatcctgattccagctatagcaaagatatacagttagtctctctgttcctatttaattcactccgtcatgccattctgaaataaagtctgcttggagtcatgtgtctgcatgaagcccagaatttttgattcatttccaaacaagaacactgttttcaccttgtgcaccttgtgagtcgagccccagaacttgggatgtggttgtgaactgattagtaccttgaatcccagttatctcgcctgcagactcccacatcctcattcccctagacatctctgaggtctgcaaattgtgcttttcacacagtcctcatctgaatgaatcttctcaccataggacttacaggggtctcttttattcttgcagtggttttcattatcacttgggcagttttgacatcccggtcccatcacagtggacacagccgagttgggggagaaatagaatccttgcttcctttgtagggttcctttcttctctctggcaacacaattgagaccctccagtgtcacacacacacacacacacacacacacacacacacacacacacacccaacacacctcaggtaagggaaacacagaggttttttgagctacagacagacctgtggggacaccagaggaagctcctatggttgtcagatccccaaagtgaaagtacagagggtccaggttgttagccacactgacatcttcagccacagtctcttggcgtagaccctccatctccagagaccaggaaacaagcttctctttcccccagaccttgattcccaggcaaataagaactgatgttcctctcactccctttgttgtctcccaggatggtggttgttatggtgatctgttctgcaaagctctgaaaacatataatatgctttgttttggaatttaccggctgagagatgcccacctcagcacccccagccagtgtacaaaaaggtgagtgtgtcttcccaccctgccatctcacctgaatgcaatggtaccgatgcctttccttgtctcctccaggcaaatgtcattgtgtgcatgtcttcaacacactgcttgcatcaaatctaatactgagctgaggactgaagagaaacatttattcttttaattactaatagtacatgtgaagccattgagggaagaacttgtgctttgtagagtcccttaccatttgtaggtcccttaccattatagaagtcagaatctcaagctctggtcccatgcatttcttccttggttgctgatttgtttcctatagctgatatttcagcttcatatattttaattgactcactttctttcatatatatttaaatttgtgtttttttctgatatgacttaatttaataaactcataacaggaaaaacattaaggatgcatcttagaattactcaaacctatgagtttgtatagtatagtctaagaaagagggccatagaggtatttctcagatctatagattacaattagctgaggggttaaaataaaaatactatgattacagtcatttcaggtgtgtataaggtaaaagcatttgtgtacatttaaaattatataacaatgtttatatatttaatgcttgggaattacagtgcttagccagagctaaaaattgttacagacttgcagggcagtaggtgtgggggaataaagggagtgggggaacgaactcctgcgacatgccagggttctggtgctctgggcgggaagagtgcagcatgctttccatttggcctgggtggatgtctggcaggggatggacaaggggcagtccaaggtctctgggccccatggaggccagagataacaggttctcagtcttgggcatctcagatgcagctggacactgtggaagagctgagaacaaagtgggggcccttgggggtggttaggtcatccccagggccgaagggaggagagggcagggagagaggggcaagagtccctggtctggtccatggctggaatgcaagaaggccttctggcaggaggtttcctctttagaggaaagcctatcccatcttttaagcacagcggaccttgatgagcagagacagtctatggttttagagttttattgtagaaaggcagggagaaaaagagaaggtagaaagaaagagagaggtgggccatggccacctggagagagggggaagggagaaagagaaggagggctagagatgagagtagaaaggtgagagcttaaggagagagaagggccaagcagccccttttatattgggctgggctaccttgctgttgccaggtaactgtggggaggagcatacctggctatagtcagataactgtgggggtggagtctagccagaatgcctggagcttggggctttatctacgtgacttatagtcacagaattatggagttgggggctctgtggtgtcaggcaccggtcactggtcactgggaacatggctcactgttccattccttgtagagctttttactgagactctattggagcaagccaaacaggctgcctttcacggtcccacacagactaatgtttttctgtaccttggtaagtaggagattcacctacagagtttccaaagaccaaattacagagccccaccctggggcttgtgattcagtagatcagggagtcaggttactaaaatttttttcccttttgtttttagtttgctcatttgttccttcctttcttccttctttgcagtgctagggaatgaacctatggcctctcgagtgcaaggcaaatgctctaccactgagttatatacctgggaacaacacccagcatttttctgaggttgctgggagtctctgagaccacactttgaggtccattgctgcagaggcaatgagctgatgatcactgtagttgtgggggtgtcagccagagaaagcctgatctaatcgtcagagggttggtcaagctctcacacctagggagctatttggttaaagaggtactaggtatgacaaaaagagaccctgcggtgtgtatctgtgactgtcaagacgttctagaatggaagttacagtgcaattgtgcgactgtcgtgaacttgacccttgtacgtttggcccatatgaatgatggtgtggcttttccattaccagctctaactttgcatctttgcctgcccttctagctgccttgttgagttaaacatgaagatttcctttagtttggaagcaaatttgaggcgactggaacaagtagatcattcagttcctcagatagatcgaagcagtcaggcaattagttcttttaggttacaggagagtcccgtggtgtgcctgcttgactcagcctgcaatacctttgctttctctgcctaggtacgtcatcaccaatcctccctacgagtttgagctcgtaccaacagacctgatcttctgcctgatgcagtttgaccacaacgctggccaatcccgggccagtctgtctcattcctcccactcctcacagtcgtccagtaagaagagctcctccgtccactccatcccgtccacagcaaatcggccgaaccggcccaagtccagggagtcccgcgacaaacagaagtacgttcaggaagagcggctttgatatgtgtagccaccggcacccgtgtgtgaaactgtatctgctactcatttccccagttggtattccaacagagtaactttcctgctccctatagtcccctctttttttttcttttcttttcttttttttttttacacattttgcatatgtatgatagtgtgcatgtggttgtcatttttatttcaccaccataaaacccttgagcgcaacagcaaataagcagacggaccaaaagttatttatgcttccagggggaaagtaacgtaaaggcatcctccagacataaatagctcactgcagggatgagttcacaggttagaagggagcacctgagagttaggcaacggaggtttgcctgatttatcaggatcatcaggatgctttgggttttgcgttttcattttttgtttgttttctctctctctgtttttatacacaaacaataagttagcacacagtcgtttgaaacaagcaaccaaaaagcaatgaaaacgcattgatcgtttccactctgggctgaggtatcgcaaaacatttgaaaagctttccaagtgtgcgcaaaagatgatcaagtatctgcttgttgtgagagagcgtcagagactttttttttttaacgtattcaccaaagcctttttgtctcggagctagcgtctttcaggtgtttgagtgaatgtttctaactttaatgcagagagaaaaacaggtttccactcctggatgtatcaaatcttagtcatttcatttacctgaaaaaaggcttgatcacatattaaactgttattctgtctccttatgctgccatagggatagctagtttttttctttcacttttgacatttgggatgaaaagccatatgtatcataaatatcagatgtaagtcattaagaactgccttcctgggacttttacatcctttaaaaggtgaatcacttaccttatgtacagaataaataacactcagaaaagagcaagtatttttccatgcattctcaagggacctttttactcccctttgtttgactaacgagggccccgatgccaagtacaattcaggctggggcaatggtagagcaggaaggagacacccagtgatagataatggtttcttgtaggagctgacgtgctcaataaatcagaatgtaggaggatagagccacagttgattcaagaaagacaaaagctagcgaccacatttaaattgctggcacagctgcatgatgctctgtcccaaagcagatggctggcaggaaaggtctaacataggtaaccctcttaaatgtacagccaattcctataggtagatgagagacaggggagagagcttctcccttcatttcaagattggaaggaggcggctgcaacagtaagccaaacacattgcagtagttaatttctttcttttctttcctttttttttttctttaaaaaaaaaaaaaacaaacctgttattcatcaagggagggaagatagatagataccttttccccaatatgcaactatcagatgttttatgcatgcaaattatgttttaagaacatagttctgaagaattggccaactttaccataaccaaattctggtatgggtagactagccttgggctcatgtgaacgtatttgggatatttatttagaaatccactgatagaacagggggtagaaaggaggggggaaatctgtcatatctttagcatctctttttaaaaggtgtttttatggtgaatgttttgggtttagatttttgatcccctgtcccctccagcatgatggttttggagatttgcttgctgtgtgactgacaagcacttttactgacaaaaaatggtgaggctctgtcagaacctccacctcaccccacaccaaagacaggggcagtgcagtattccaaccagcaatgggtgggcagtcaatgtatacatgtaaattcaaaagtcctgtgagtggaagtattttttttcaaattatttttgtccttatgtatttgatttatatatgacatctagttatctctttatatataattatatatataaaccatatatatacatatatatataaatatatatatttatatatatgtatacatgtcccctagttttggatcatgagagatcttcatgcattctttgcaaaggaggttatgaggttacgccttcagaacattgataactataagaatgtgccagttaaagtgctcaacaggaaatgacagtttcaaagcattgtaaaactcacatagcttacttctctctctaaagtgcaacaaggatgactagaatgggccaaggtatgacaattaatggttctgcatgacctagccactgctgggggttttcttctataacgttgtccttgtgaaacttttgtggaattaaaaaaaaaaaggagttacaaattttattctgttattgtttatttttatttaaattgttctgtttgtggttctctttcatttgttttgcttctccaccctccccctttctcctcctcttcctttctcccttccttcttctttttcttcctccactttctcaattgctcagcgcaatgaggctgtgctgctgctatggctagatcccttagagtttgttttggtgttcttgggggtcgggtaattggggggtaacttctctccatctggcttgccttcaaatctgcacgtggcctccctgcccacctcggtaccttgccccaagtccaaaagcattttcccattgagaaacccagcttcttccactggccccatcaccactgcccgaacccagccccaactggtctgttcacatctctgtgttgatcttggcaagacccaccaaatcgaacaatgatgccggttgatagatgtttttgtaagacattcacagctattccatttggcaaatgtgcttctctgttaatagttgaccctcctttggtctgtaggaggagggttattaatggcaaatgcattggtctgttttcctgtttgatcagaaggaaccaaagtcaaagctgttgagccccgtgaatccacttgagagcacatgccaggttctgaaggagctgatgactcagtctggacagaactcacacgtgtctcctaccacctgccattcagacatttgttaaatctcaaccacaaacggggcagacagatgccaatccaaagtgtctttttaatgcaattgattagtggctccagtagatgagactgtaactgactggaatgggaacagactgtgacatgagatgaaatctgggagttttctctggactttgggcacataatccccactgggtaattacagatcattgagaattgatcatgagtgactactgatatatctggtggcaacgggatcatgggggatcatggtgacctctcttttattagctgaaacttctatattatactcttcttaatagagtgaagacattcctccaccatttaccatttgactcgaaattccctctttcaggagaagagaggctcctttaggaaggaggcgcgtgggttcttcatgtattgtctctgccctacttcttccttgcccaaactagaaacagacaaggaatgttagaaagtgagagaacactgtgaaaagaaaaatgcacatattttataagaatcacagcttgaagctcggtgatatccccagttctggaagagaagcagtttgtgagccattcagtttgctttggtcaggctttggaaagggccaaagtgaagtgagtttggagagtatgaggaaaagctttgcgccaactgtctgataactgtggaattgttaatatccctagaagctgctattggagtccttctcaactccagttgaaagagacccttgaactttccagtctcccctatattttggagatgtttccaattccattatgaaattaaggcttatggcacaggatattaaagtaggcacacacaacacgtatttgaaatcattttcccatttcaaactctcttataatttatctgcatccccttggtttattcttggaaaagtagccattaatgcctgaggtgttgacacagctgatttgctggtgtcagactcttggagccagattctgtttctaagccagggagacaagccctgtgagcttagggactagagagactgactatgcctgatggcaacattattgagatcctaggtgaccagaggaacctttgactgactatctttcagcatggggaatgccttaaaggtgtctatatcccaatagagacaattatatcaaccttccaggttcctatagcaacagactccttgaagaacaagaaagtacagaaacttctgggagcaaaagataagacagggtacaaatcaatttctccaccagcttccatcagccaatccctgctttgacacaatatgataagggagtagctgtaggcatctgtcattgagctggataaatatctcccataaggagactgcacatggaagtgagcagaagaaactccattacctaagaggcaagagtatcctcagggtttggctggatgcaaggatggacagtcagagtggtccattacagagaaatgagataaaaggaaacttgtcagagtctggtagaaactgtgcttatgtttcagatggctatgttctcctgaggtagaagaggaggaggctggatgcatagttttgcctgggaggcatctggttttgtaagtgtagggagtttaccacactgcctatcagaaatgtaatccaggaaaccacatagagttgcccttacagattggagctctttgtagctattgctgtcttctcctctgtatccaaatgggatctttcccttccatgcctttgctctcaaagcctcagcttgtggtgctatggaaagccagttattccacgtgcctttactgtgttatcagctccccacttcagcagtcttttctggggagtagttatatgaaaaggctgatcacaacactgaccaaccacagtgccaacaaaagtcctgtgttcacagtgcgatggtttttccctcctctttgggaactttaggtaattcagcccttctttaccataataactctctaaactcttgttctaaaccaatcatttccttatactggcaattgaagacataggtggttttccacggggcaggacatccttcacatgaaaactgccatcagaaacaaggacccactacctcacaaccctgaactccccagtattacaccatactataattattatagtaactattcggccttactttaattcaccttccaggcaaagactacccacaagatcctcctgagtcacctctatggcaacaatctacattcttcaggctagcccccaacttagacacctcaggtctctgcttctggctcctccattgaagaagttcatttgcaaatactacattcagaaggtgtcacccactcctacatcatacttataccaatactaaccttaaagctaatgcctaaggcagccatcactggtactctacccagcaagttacatctgtaaacacatttaactctcatgatcaaaccagatggagggcttatgagaatcttcacaggacagatatggaatatgaagaacaccaaagtctatgcactaatcttagccattgtaatacagtgcctgaatcatgaataacagtaacaaacttagcaaatattatttgctgaccatgtagctgaatgtgtagtaagtcattgatacctgttccattgatatagctaacaagatttggaagagtattttctcaaccctattctatagagaatgattaacaataagatactttgcataaccttttcagagcagatagtatgtgagagagatccaggtatacttgatactagtccacaagctagtgccatttcattgcccccccaacacacatagtgtgtccagagtgtacttagtggcttaattggcccactgtgtgacactcacaatagtgtagctgtcatttttacctccagttattttctcaattttattttgttaccagcctgcttatcacatataggaacatgtcatttccttactgtctctaagtgccttatgacaaaagctccttagaggtcacacagtgtcctcagaatgaggtcatcatgtatatattaaccacaagaagtttatgaacaaacaggggtattttattttgttttgtttgcgttttgattttgagtctggtaccaggaaggtccccagagatcacagaacctcttgtctcaggcatgaaataaggccacagagaacaaagataagccaagcattagagtggagttgccttaactacttcagtacttattagaattcctagtttgagtcctccttctagtgttcacttttgtacttctccattggcacagctttgtccttaaatggcaagattctgtgtgccatattgtccccatattacctgaaggacattacacagaagcctagtgactgatgaccattaaaatacaacccctctgatgctgtttgggagacctttgtcccccaaaattttagacactgtccagagcatctcactagttcgatttcctcaacatcttacttgaccatgcctccacagcatagacattgagacactggaattaaacagtgtcctgtcaggaacaatgagaacctcaactcctgatgagaaggtgtttgccttcaaccctttccttgcttgaagcttcattctcaaaccacatgggctagactgactaggttttctcttttggacaagaaatgtaaagagaaaggagcttaaatgaggccaataatgttgtctttcctacaggcagttggaggaaattgatactctttccatggtgaaaggtcaaaataccccctttgaattgaactgtaaatactaaattctcaacaagtattctcagcagcagttgtaaaaatttcagcaaattgcagctgtttggtttttcacccaaaacacatcccccccctttccatcagtgagacttacttttcctaccttacaacccagcactaaatcccttcagcaaaatcgttccgggtaactattcggccaagagccaagggcagcttgggcaaacagcataaacaccaggctcctctctgagagccatctctgcacataagctgtttgaggaagtcatagttggaaattgtttcagagacctggcaatgcttttaaaacatgataactatcacactttactcttctctgaaaggttagtttaatcgtagatcacaaaaaaattggtttccacaaatgcataatggttcatctatgtcacacttgaactaaatggttttttaaatggagctgaaattattttgatgtgtacacagtcccagatttctatacaaccttttttaaccagcccatcaggagtcttgcctctaaagcctcattaataattcagatgtgctgatgactttaaaagatctatggaattgaagctcagggaaagaaaaaaaaaaaaaggaaaacctctgcttgacaaaaagataaatgaatgtagaaagaagctgtaggaggctggcgagctgtagatcatcccagaacagattgtaactttatcatcctgtcagggggaataatttaaagcgcttaatcagttagcttcactgtgaggatacagtgttatgaattcctctcagccaatctgttcaaatcaaagtgaacttcattgtcataggtgagatagccagggcaggaggaatcacagagaggagcatagaagaggcaggaagtgtcctgagggttaacctgggctcttgaaccttcctcaggctttttccctggccccagaggcagccatattgacgagccagggcatgaaatggtggaaaaggcagagtgatcaagaagtcatcacagatgcttaacgtttatgagccaacacatacacacacacacacacacacacacacacacacacacacacacacacacacacacacacacagtcatatgcaaaggcacacacacagcaagctgggcaatcattttaacaggtaggtctacaaccagacacaaggccaatgcaaatggttttataagcaataaaacaaacaacaaacaaacaaacaaacaaaacaaacataacaaacagaagcaagagggatcatcctctcttgggcagtgaatatgtttgaaagttgctttccttccctaagccactgtaatgaagcctacgatgccccacgctagatgttctattgcccagttgcttcacatggcttatttttcagaaaatgtcagttctggaaaggggcatacattggacttagacccagctaagagactgatcctctgtatagagcccgaaaggccctgactcagcagtctcactcatccacttcttagctcttagtggagaaatgacagtggcaagccaccatgagctctctgttcatagcttgggttattagagtcagctgagatactgccacctgcaactccttccatgacctcatacccacagagttcttgtgctttaaataaaagccacttagaaattctcttttaaaatagttttctattctgattttccacgcttattggccagcaaatcctgtggggttcctttaagggatgcagacaagacagaagtggtccagctaacaactgcctttgagtctgcttatcataacaaaatcaaaacaaggctgggaaagaggttaaactgaaaaaaccttctgaactacgtgcgctgcagtagggatgctgttcatctactccaccatagtctctgaggtcgggctcctcctagtgtctcccagtcctgatgatagcacattcatttctttcttcacttgctacagggaggagaggcatggttcaggtttcgggggcttctgtacactgcatttcttagcaattactcactgccggcttctattgattacctttatgcattttcaatgaactttccaaaagctcaacctaggactaattaagcttctcatttctccttcttgttctctatccattttgccctttagcagaaaagaaatggtttacagatgagccggataatgcctatcccagaaacattcaaatcaagcccatgagtacccacatggctaaccagatcaaccaatataaatccacaagcagcctgatccctccaatcagagaagttgaagatgaatgttgactcccaggagaccagaactatttttttaaagcctgacaaacttcataaatggtgacgtgacttttcttcctcttacatgctgaatcactggtggaaattctagaataagcaagaattgcaagaaaataaagttagacagatctttctctttgccttgaatactgcttccatgtattttggaaaagaaaatgatttcatttataaatgaacatactaaaatagtcatgtatagcttctagtgttttaaattatttttatttattagaaagaaaatatattttttctttttttttcattgccagatatcttcccatatatcacagcaatgcaaaatcaaaatgagttagtggccagattccttgatgcacatttctcttctttctctctttttctttgaggagaatgatggtcaccaccccaatttgtaaagaagggaaatggattactaaaacaaatttaagatggccaacattgtatgcacatagttcagtaaatcaaaaaaaaaaaaaagtcaaaagagcggaggtgaatatttccccctctcctggacgggtgtatgttttgatctgcattgacaccagctcttaacaaatcaaacttcattatcttcccagttgaaagtcattatctttgtagtttcagttttcctccagtgtttcttatcctttgtttatatatttagaagaaagagcttcttgtaacatttctgcagttgccagatcaggtttaagcaaccagctcaggatatggggaagggttataggcacacctagaatgtgaaggtcgtgagccagaggcacccaagagcagactctgttgttctcatggtgaggcctcctccgccattctttatgctccctgtttcatacttctaaggcacccatgcaagtcatgtggactgtgggagagtctgctatgttcttttccctgctcagagcttttagcctgaaagttggtgaacatcaacgaatactttacctaacaataggatctaagaagtatgcatgcttaccacaaatttttggttcggtagtctgtcaaggagatgacttttgctcagattttcatttgttggctttccttggttgaattgctgggataaaacattcaaactcgctaaaatacttacaaaaaaagaaaaccaaccaaccaactaaccaaccaaccaaccaaccaaccaaccaaaaaccagtaaacaaccaaaaggaaagtaagtcatgctcttaacatagactgttagaaaaaggccttggaaaattaccagcaatgaaataaaatgtatcagccacttcaacgtgtggtcaaaagatttttctagccatcagatgcaatcgtgatgtctgagctctgctgttgcatgcatgcccagtgtacagtcacctcaacaactgtttcattccaacgactcagaaagtcttttcaacttcacagtgatcgacctttgatatgatcatcagggtctctggagaatcctgggtgtgactgtgatttttatttccttagaaatgtaaaatgtgaacacttttccaaaccaacaaaaattgcccctacagacccatgacatctcttccatgaactctttaggccatgattctgtggtacctagttatgatagtacaaatcagatcagagaaaagcaatgtgatcactatggaaacatgtccactaaggactccaattaccaatgtaggcaaaatgagcttccacctctgtccactccctgcagagccaatatagctgtgcttccaccttgtaggcgttgtcctgcagtgacttgtcagactgtggttactctgttgtcacactttgtagaattagttctataaaagtattgtgaatataatgtgtgtccaattggattgttaacacaaaaatatttataaccaatcactagtctactcaggctaaaatgatgtcagcagttttatattcgggcttataaacatttcttggtttccaacagaactcagatgtgttggtggggagaatccactgccagaatcttgacagcattcctgaaagctaagacttcctttaacatcatgattttgcatttggggttacctaagtacattcatgtcaatccacgctcttctttccttcctgaaccatagtaggctcttctttacactcattccaattagtcttacctctgaatttgtcttagttccttaatctcccatggtgaccaatgttttttacctaaataattttccatcagaaaaataatggtctcaacactaccccatggaaggcaggactcagaagcataatccccatttcccactctagctagagatttaaatctaaacttgtttctcaaccacaatggctctaatagtttcctacactaagtgactccctccactcaccaatcagcttccaaagccctagatagtagaaatccatttccttctatgatagagtaataaatgaggaagaggtcaagcatgattctcagattgtccagaaaatgaccatgtggtggccccatctggcaaaagcttatggcaactcagttgaaacagaaataacatttgttaaaaaagaactgaagggctcaagacaacatgcaaagttcccagtttgcatctgttggttgagttctgagttctctgtaggattaaatagtctttccatccacattaggccaatggtggtcctctttggaatattccacattagaagggtctgatctttagtccctgattagggtttcagaaaagctatcttggcaaactaatgatgcttggatgctttgggaatcagaccatttgtaaaatagaaactacctgtgtacatcattgtataatgatgatgtacctgtaaacattgtacctgtgtacatcattgccatcaccatctttctcatgaatgcagtttgtcttcgtttaagcaactgtattttgaaattactctcccctgctatagcaaatagaagacattcacttaaggtgttttatatttataaattgattacgtctaagtcacttggaagaacagccttccttctacaagttgcactttgtttttgttgttatttgtttgtttgtttttaagtgttggaagactttagtaaaggaattagaatggttttgggttgagttggaagtgtagactgggaaaatgtatgaaattagagatattttgaatggagaacagaaagtttccaactgtgcctgatttagaagttcaagagcactcatataattttagctattaactataaaaatgttctttaaattcttcaagtttcattgacttaaacatgaggttggttcgtggagatggcgaaggtctttttcagaccaactaaagcagtggttgccttacctcagccaagccctgggagattattttttttccagagctgtaattatggctctctggccatattatccatatagcatttctgagctaaacacagcatccactctctgctctggacaaagaacagtcaggttcatttctatattctccagtttgaaagctcttagagtggagatgcaaaggtttaccttcagcctcacctccaccactgatgagctgggtttagtcattctggtttctttttacagccttccttcccaccttccctgtgtcttggtgcagtggagattggatagtctcttcatttttagcccacatctccaatagtatgtagaaagagtttggacaaccctactctgctactgctattcccattcatgtcccctctctacactcacccttacttctcatttcattccatttgtctggttgtgcccacgttagcacaatgtctttgctgcttacattcaaaagtgccattatgagttgtcaatatcatcgtccaggaggacctcgtggaaagaatgatagaaagaggtagaaaagtacaacaaaaatcagtatcagacaagtgactcagagtcatcttgattaccaaaagatcacacaaattcactgaacattaaattctagcccaagatctgcccatttttattttaaccatattttctgcttttggaatggtggtaaagtcatagatacagtagccctcactacttatctctttagccatcattttcaaaaacttagacaaactgaagaatcactttcaactttcccactagattctctttctgcctctgctgtttcccccatgttttaaacaagtatgtttctgcaatagaacaatgatttctcatttaaatctcataacctcttgataaaacaaggagtccctttggactcatttaggttatttaaactaagtttatttttaagtggtcatagcccatacctattaataattccaagattaccactaaaataaggctatgcagaggacattttaaatttcagttttgaatacctatggtaagagtgattttaaaatatttaaaagattaagaaagggacccatgtagccctacacttgttagaatcccccctgcattccagtctcacatggcttcatggagaaatgattctcttttagactttttgttctagatcactctttttaactgtgcttttgagcatgaaaatgcacaactcagagtatatatcaaaaggctagaaggaagaacaaaaagagatagatgcaacactttaagaagccctggaaagaggtggtacttacgtagaaaagaagaggttcccttgaatcatgaatgggaaaaataataggctgggctgtggagacttttcaataggaaatacttagtttttgactggaggcacaaggatcgtgagttttgttttgttttgttttgttttgttttgttttgtttttccaatgaaagaggccttcaggagctataatgcactagtaccaagatgattttgctatatggaacaacttaccttcaaaaataagtttgtgtccatgtacttactgaaaacaatgtatggcaagagttcatggaaggaactaggaagtggatggttgaagagccacattgaaatcagagcattgatttagaaagtcagagagaaccatggaaagggccgcacaaggagcgatgggtagtggtgactgtaccctttggggttgaagcctttgagacattctattctttctggaaagcatcacagaaacataggctctcaagttgaaccatctctcagcaacttgagatcctgtgattgcactcaataacagctcaccatgaagaacacctaccttcttcctacatttccaccttgtcatgcagtactcaattattaaaacacccatgggtccaccacacagattaaaggaaaggaaaagattttcagattattttacaaaagagtcctgctggttatactattttacagacactaatataataacagacaccagggagaccaccaaaaaaaatcatagaataatcaagaatttagttggaggaatgagtatgacacattcttgcttgcagtaagcttgaaatccaacttaaaggagcaccctaaagagccagtagagaaaaaataagcatggctagaacactgccctccaatagagcaggagataagaaacaagcagtttgaagcagttaatcaagcgttgtagactagacggtgtttcagagttaagtatgctgaggagcaacatcccagctcattcaggaacatggatggatcaatgatttcatgagttgatcgagtagtccctgtgcacctgttgctggacagcttgtgtcccttcttggcaacaggagacatgttatgtagaacatgcatccaataaagacttttaattggatgggctacatagcaagtaagtaccatgacagctgtggaagtttgacttggattctaaggatgggcagtttgaaagagtctataaaaagtaatggtttgctgcagaccccaaggacagagcagtgcagagggacagaaagaagaggagagatgagaatgtgagacaagaatttagacagctgagaaaggggctgctttcatccctataaaaaggaggggagagatccatttcaatcatgaaggtattctggactgaagatgcaaacagctgagaagatgttttgggaggtccagatcatgaggaagccccctttagcccccccgcccctgtgattcaggtaattataaagggagaagtctggatgaggtttttcaatgaagaaaacataggcttagatgacaggtcagtagaactgtctggaggctatagccaagttttcaggggctcaatggagcaaaccaagctgatatgattaggacagaatatctttttagtattgggagagtgggaaacagaaaggagggcttaaaatagagaaaatgaaccagtaactgagggttgagatacaggggatctgaaatagtgaagtaatgaggcagactgtaaggaccaatttctccttttgtctttatctcatgtggttgccatgaagactggaatgagtgggaaagtagcaggtcattctcggtcagtttttacaccatggaaatggggtacacggggtacccaggtcatcagcatgccctctaaagtacccacagaaaggtcttgagaggtggtctctcctttcatcagttcatatcacccccgttgtacctcatccctcatgcatagcacacccagaaccttctagttgcaacagtcttcatacacaaaatgcaaaggtcgccttgttctggtggcttttctggaccggggtaaacaggaatgctttttggccaagtgaaaactgagctcctttctaggtagaatattacattgaaaagagatttcccctggtctgtttatcccatgagaaacttctgtgtttcttcttgtcctccaaagctgaccccgaagctccccagggcctgtcttaggaaacagcacctgtcctgctgtttagagtcttcgatggaaatgtacacacacaacacatgtgcctgtcaaagcatccccgaacttcctgccctagggatccaggaggtagccatccaggaggaggttgtcatagggaaggacaggaggaggtagtcatccaggaggaggtagtcatggggggaaggagcccctataacgagacaagtcaagccccaggtctccacgaaaccagagccgttccccttctccttccgctgtgtacacatttgaccagaactgcaacatttcaaacataaacccagatctgcctggaaatcctaattaaaaacgttccattcccaggtggtacaatcacatcctgcctaaagtgtctggctcacggcccaccacacagatgccgaaaagagacttttccccacttaacaccaaaaccttcatttgggatttctttaggggacaaagggaaaaaaaaaaccaattcagaggtacccatatgcagaggtcagcctacaacacattcattaagggaaaagagcgtggtttgtttctttgtctttcacactttgattgctggcatggtgactgtggctatgatgaattatgtaaccagacaggaactggagaagagaataaatgctggtgctctgaaatgacctacccaactctgtcatctgtaacaaccagtgataactctcttgtcttgtaaaaagggtttgtacataacttgtacatggtttcattttgtatttttcgcagattaaaaatttatgtatttgtgttctaaaacaaggagtgtttcttgtgtctttgtaactgtcccatagggtgtggggagggttacctaaggtcccatttcacccccttctcctttgtgaaggtgaaattgtggaccagaagcagccatgaagttgcttcttcagttgcaactgtgggacagggtacttcccaacataggcatgagcagtgttggggaggaatggacgctggtgtcattaaaaagttcagagtcatacagggccacactggttgagagggtcacatgctgctacaggcgactccagaatatagtgctctaaagacactgcctacattccatagaaccttgagaagtcaacactggatcacttctgccacctgctcccatgctagctacccttccttgctattcatacaaatgagcaaagtctccctgcttcttcctcatcaaaacacaggggttgaagcttgcttaaggggtgggccttcttgttcttcacacccatagatgaaatgcccaagtcaataatatccagtaacaatgatactatttgagtctagatcttcagaatcttgtggatttgaagcccttacaggacaccagtctccttagtctaagactgacctggcttctgagaaaagaagatgctggtgagagggttccatgtatgtactatatatagactgtcaaaaattaatatcattagagattgtacccttcttcattagccaacattaactaacttcattagttagtgtttacattcctttattgggacttgttgacaaaacagtatgtaataacatgactctgggtctctagttgaagtaataaattattggttcacatattaaaaattgatctgtgggagagagtacagcatgcccttacagagacataaaaggtttgcttagctattgaagaacaatctgattgataccttgaaagccaaatctctgggtacgtatgcttattagtctttgtcaacgcaacagagactagaaccatctggagtgaggaaacctcaattgagaactgcctacaacaacttggcctgtgggcatttctgtgaaacattttcttgattaatgattgatgtgggagggtctagcccactgcaggcaatatcgcccttgggcaggtcatcctgaattgtatatgaaagcaagctgaacaagccacaaggaccactccagtaagcaactttcctccatgcgctagtatctgcctctgtgttcctcccttggcttgcctcagtgatggactaaacccataagttaaaaaaaataaaaagcctcattcttaccaaatgtactttttctcgatgttttatcaaaacaacagaatagaaagcagaggcagtactcaaacaaaaccagccccaagcagaccttattgccaggagtgagaaactgcagacttgcttaccttctcctgccaactcctcacagatctttgagctccagagtctcaacttgtcttctcaatatttgctaacaaatctgaatgttgttggggaaatgtaattgcagagcatatggtctccattagtcaggcaaactctactgccaagttcagctccaaggaaggagtctgcataaaggatgaaatattagggaacgatccatagtgacagagaagccaaatgaaagagatgaggcactgagttgcaaaacagtaggcttggacaaaaggacacaatgactgtggaacatggttttccatttggtaagaaaacaaaatatctgtgaatttctactgagatctctccgtagcaaaaatcaaaggaggccattcaccaagatcaatattaactgtttctcaatgtcagacgagatagattctgcctgggagaaaatcgtagggcaaacagaatacacagcttgctaaaggaataaagcaaggatgagatcaaaatgtaaacatcgggcatagtgctattttcaattgctgaggctcagccttccaaaagagagacaggttctcatgcttacagatctgtcccattcttaaaatgtagggtaaaagtcagaaactcaagggatctaagatcaagaaaaattattcagcacccttgccacaaaaatggttttgcaatatgccttttaaaataagaaaatatgttaataagttggttatacttccagattgatacacatagatttaatttatcattttactcaacatattgagtctaatagctaatcttggttgtcaacttgatagacctgggaaaggggaacctcaagtggaattgtctccaacattttggctagtgggcatgttttgggggggcactttcttaattgctaatgagtttagaaagacccaacacactgtgggaagtgcctcctctgtactggtcttcctgggtggtaaaaaagaacaggctgagcaatggaaagagatgcagagacccacagtcaatgattagacagaactcagagagtcttccagaagagttgggggaaggattggtggacttgaagaggacaaggactccacagaaagaccaacagattcaactaacctgggcccttgggggcttccagagactgaaccaccaaccaaagagtgatcccaggctggacctagactccctgaacatatgtaccagatgggcagcttggtcttcatacgggtcccccaacaactggagcaggggctatccctgaatctattacatacccgcctgtggatcctgttactctaactggactgccttgtctggcctcagtgggagaggatttgcctagtcctccagtgataatgtgccagggtagggtagggatactcatggtgggtggggagcctctctattctcagagaagaaggaggaaaccggggaggatctgtagtacttggaggagaagggaacttgtattgagatgtaaaacaaataaataaatttattagtattttaaaaagaaaggaaaggaaaagaaaaacaaaacgaaaaaaaaaaagcaactgagaaccagacaggggacccagcaaaacagagttcctccatggtctctcttcagttgttccctcaaagatactgctttgacttccatcaaggatgaattggaaccttttaccatcccccgtcccccccaccacctaacattgcttttggtcagtgttttatcacagtaaactaggaaagaagctggtaccaggaatgtgaggttttgctgtgatggacctgactatgtggactttatgtcttagactgttttgtgggggagaggtggaggatttgggagatttaggctagaaaagccattgaatgctaagatcttaatgagctgttatgggaacatggataatatttcagagtgcaatggagacgagataatggagacctggcttatggtcctggactatcgggatcatttgtgtgatcgtatttttattaagaatctgtgaaagtaaaacattttctttactgtgacaagcagtgctggttatctggggtttaaaaagttaactgcaattaatatgagaccagcatcgttaaggtgaaattttctgggaagtgtttggtcagagttggcacagaagctgtggtctagacagggccaaggctgcatctcgagctggaagatgatcatggtgatgtgtatgtctcctatatagtactggttttgaatgtataaagggattgtagagagcagcagaggcttggtactatgagaggttaggagagggtattgatgaaagtgcagtctcagcttcagtggacaccccaggacattggagatgccaggaccataggatgaatgccaaggacaaaagcagtctgagcctacactatacgctgtgtctgttcacacaaatgtgaactttcagtcatggtatttgtcacaggaacagaaagcaaaccagatcacaaccattaggctggggcctagcaaacacataagtggatgctcacagtcagttattggatggatcacagggcccccaatggaggagctagagaaagtacccaaggagctaaagagatctgcaaccctgtaggtgcaacaacattatgaactaaccaataccctggagctcttgactctagctgcatatgtatcaaaagatggcctagtcggccatcaatgcaaagacaggcccattggacacgcaaactttatatgccccagtacaggggaatgccagggccaaaaagtggaaatgggtaggtagaggagtggggggggtatgggggacttttgggatagcattggaaatgtaattgaggaaaatacataataaaaaaatatttaaaacaaaaaacaaaacaaaaaaaaaccaatgaagtaggcaagctaaattacaataataaacatatctagcattaatatgctatgtacttaatatatgatattctagaattagtgttatatttttatatataacatgcatatacacatagagacacagacacacacaaaagcacacacacatgcacatgtaccttttaggacattcaggttgtttctcactttttcctaccttcttgaattcttctcatctttgatagatagaaccactactcttctgaagatgtctatgctagcaagtgggtagaataaaaaatgagccccaaacttacaatacccaagatacaatttgcaagacacacgaaactcaagaagaaggaagaccaaagtgtggaagcaggagtgggtgggttgaggagtgggccgggggtggggggtggggggtaaaggggacttttgggatagcatgtaaatgaagaaaatatctaattaaaaaaagatttagcatgccttcataataaaagccctagaacaagtaggactgtagaaaacatattccaacataataaaggtttgtatgacaacccccccaaaaatgagccccaagagaatcaagctaaaagccccaaagatttttgtctgtaagccagttgtttcctgttcatcaaaacctaaacaacttatgggggtgggggggagtaaaataagttagaagggaaattgatgctgaggtaattaaaatggaatatctgtgttctgaaagctgagaaagatcacatttaatacaaagcaaacataggcatgcacttggggtttaacattaagaaaagattgtaagactgaaggagtagaaagcatgatgcaaagtctaagatggagcactgtgtagagataacgacatatgtacaagaccagggatctctgtggtggcatgtgcagagcatgtgagaggtcctgagttccaacaatgaaatgaaggactaaccttattcacttacttttctcttataaaaagacctatgctacaaatgtaaaacctgaaattaagctgtacaaatgcatcatcaatgaaaataagttagaatagctgggagtaaggaaccatgggaatttattctaactaactgaaaatgtgtgttcagctggcattaacatagggagtgatgtcgttaagaattaaaaacaataagcagagtataaaccattttagccaataaatctgagaatttaagtgtagttaaaattttaacaaaagctacttaaaactgatttaagaacgaagaaaaattgaacaaggcat
